(19) United States
(12) Patent Application Publication
(10) Pub. No.: US 2023/0383012 A1
(43) Pub. Date: Nov. 30, 2023

(54) ANTIBODIES THAT BIND PD-L1, PD-L2, AND/OR CD28

(71) Applicant: Xencor, Inc., Pasadena, CA (US)

(72) Inventors: Gregory Moore, Azusa, CA (US); John R. Desjarlais, Pasadena, CA (US); Michael Hedvat, Encino, CA (US); Veronica Gusti Zeng, Duarte, CA (US); Juan Diaz, Anaheim Hills, CA (US)

(21) Appl. No.: 18/300,302

(22) Filed: Apr. 13, 2023

Related U.S. Application Data
(60) Provisional application No. 63/330,769, filed on Apr. 13, 2022.
(60) Provisional application No. 63/379,100, filed on Oct. 11, 2022.
(60) Provisional application No. 63/382,592, filed on Nov. 7, 2022.
(60) Provisional application No. 63/478,881, filed on Jan. 6, 2023.
(60) Provisional application No. 63/480,478, filed on Jan. 18, 2023.

(51) Int. Cl. C07K 16/46; C12N 15/63

(52) U.S. Cl. CPC C07K 16/468; C12N 15/63; C07K 2317/31; C07K 2317/52; C07K 2317/622

(57) ABSTRACT

Provided herein are novel αPD-L1, αPD-L2, and αCD28 antibodies. In some embodiments, the antibodies are αPD-L1×αPD-L2×αCD28 antibodies. Such antibodies enhance anti-tumor activity by providing a costimulatory signal for T-cell activation against tumor cells while advantageously also blocking inhibitory PD-L1:PD1 and/or PD-L2:PD1 pathway interactions.

### PRIORITY CLAIM

[0001] This application claims priority to and benefit of U.S. Provisional Application No. 63/330,769, filed on Apr. 13, 2022; 63/379,100, filed on Oct. 11, 2022; 63/382,592, filed Nov. 7, 2022; 63/478,881, filed Jan. 6, 2023; and 63/480,478, filed on Jan. 18, 2023, the contents of which are hereby incorporated by reference in their entireties.

### SEQUENCE LISTING

[0002] The instant application contains a Sequence Listing which has been submitted electronically in XML file format and is hereby incorporated by reference in its entirety. Said XML copy, created on Apr. 11, 2023, is named 067461-5301-WO_SL.xml and is 3,420,050 bytes in size.

### BACKGROUND

[0003] The natural immune response against tumor dispatches immune effector cells such as natural killer (NK) cells and T cells to attack and destroy tumor cells. Tumor infiltrating lymphocytes (TILs) often express multiple immune checkpoint receptors (e.g., PD-1, CTLA-4) and costimulatory receptors (e.g., ICOS, 4-1BB, OX40, GITR, and CD28). TILs lose their cytotoxic ability over time due to upregulation of inhibitory immune checkpoints. While checkpoint blockade has demonstrated increased clinical response rates relative to other treatment options, many patients still fail to achieve a response to checkpoint blockade. Engagement of costimulatory receptors on TILs could provide a positive signal capable of overcoming negative signals of immune checkpoints. Preclinical and clinical studies of agonistic costimulatory receptor antibodies have indeed demonstrated that agonism of costimulatory receptors can result in impressive anti-tumor responses, activating T cells to attack tumor cells.

[0004] It is also important for cancer therapy to enhance anti-tumor activity by specifically destroying tumor cells while minimizing peripheral toxicity. In this context, it is crucial that only T cells in the presence of the target tumor cells are provided a costimulatory signal. However, agonism of costimulatory receptors with monospecific full-length antibodies is likely nondiscriminatory with regards to TILs vs. peripheral T cells vs. autoantigen-reactive T cells that contribute to autoimmune toxicities. For instance, urelumab, a monospecific, nondiscriminatory, pan-4-1BB agonist antibody, exhibited significant liver toxicity in early phase clinical trials (Segal et al., 2016). Thus, there remains a need for novel immune response enhancing compositions for the treatment of cancers.

### SUMMARY

[0005] Provided herein are novel αPD-L1, αPD-L2, and αCD28 antibodies. In some embodiments, the antibodies are αPD-L1×αPD-L2×αCD28 trispecific antibodies. Such antibodies enhance anti-tumor activity by providing a costimulatory signal for T-cell activation against tumor cells while advantageously also blocking inhibitory PD-L1:PD1 and/or PD-L2:PD1 pathway interactions (see FIG. 94). In some embodiments, such trispecific antibodies are useful for the treatment of cancers in conjunction with αCD3×α tumor target antigen (TTA) bispecific antibodies.

[0006] In one aspect, provided herein are multispecific antibodies that comprise a PD-L1 antigen binding domain, a PD-L2 antigen binding domain, and a CD28 binding domain, wherein each of the binding domains comprises a variable heavy domain and a variable light domain.

[0007] In one aspect, provided herein are novel 1+1+1 stackFab₂-Fab-Fc format antibodies (FIG. 83D). This antibody includes a) a first monomer, b) a second monomer, and c) a first, second, and third common light chain. The first monomer includes from N-terminal to C-terminal, VH1-CH1-hinge-CH2-CH3, wherein VH1 is a first variable heavy domain and CH2-CH3 is a first Fc domain. The second monomer includes from N-terminal to C-terminal, VH2-CH1-linker-VH3-CH1-hinge-CH2-CH3 wherein VH2 is a second variable heavy domain, VH3 is a third variable heavy domain, and CH2-CH3 is a second Fc domain. The common light chains each include from N-terminal to C-terminal, VL-CL, wherein VL is a common variable light domain and CL is a constant light domain. In this format, the first variable heavy domain and the common variable light domain of the first common light chain form a first antigen binding domain, the second variable heavy domain and the common variable light domain of the second common light chain form a second antigen binding domain, and the third variable heavy domain and common variable light domain form a third antigen binding domain of the third common light chain.

[0008] In some embodiments, the antibody is a trispecific antibody that binds PD-L1, PD-L2, and CD28, and each of the first antigen binding domain, second antigen binding domain, and third antigen binding domain is selected from the group consisting of a PD-L1 antigen binding domain, a PD-L2 antigen binding domain, and a CD 28 binding domain.

[0009] In some embodiments, the first antigen binding domain, the second antigen binding domain, and the third antigen binding domain are selected from the following: i) the first antigen binding domain is the PD-L1 binding domain, the second antigen binding domain is the PD-L2 binding domain, and the third antigen binding domain is the CD28 binding domain, ii) the first antigen binding domain is the PD-L1 binding domain, the second antigen binding domain is the CD28 binding domain, and the third antigen binding domain is the PD-L2 binding domain, iii) the first antigen binding domain is the PD-L2 binding domain, the second antigen binding domain is the PD-L1 binding domain, and the third antigen binding domain is the CD28 binding domain, iv) the first antigen binding domain is the PD-L2 binding domain, the second antigen binding domain is the CD28 binding domain, and the third antigen binding domain is the PD-L1 binding domain, v) the first antigen binding domain is the CD28 binding domain, the second antigen binding domain is the PD-L1 binding domain, and the third antigen binding domain is the PD-L2 binding domain, or vi) the first antigen binding domain is the CD28 binding domain, the second antigen binding domain is the PD-L2 binding domain, and the third antigen binding domain is the PD-L1 binding domain.

[0010] In some embodiments, the CD28 binding domain comprises a variable heavy domain having an amino acid selected from SEQ ID NOs:3354-3389 or a variant thereof, and a variable light domain having the amino acid sequence of SEQ ID NO:3239 or variant thereof.

[0011] In some embodiments, the PD-L1 antigen binding domain having an amino acid selected from SEQ ID NOs:3235 and 3243-3260 or a variant thereof, and a variable light domain having the amino acid sequence of SEQ ID NO:3239 or variant thereof.

[0012] In some embodiments, the PD-L2 antigen binding domain having an amino acid selected from SEQ ID NOs:3267 and 3275-3347 or a variant thereof, and a variable light domain having the amino acid sequence of SEQ ID NO:3239 or variant thereof.

[0013] In some embodiments, the first and second Fc domains are variant Fc domains. In certain embodiments, the first and second Fc domains comprise a set of heterodimerization skew variants selected from the group consisting of S364K/E357Q:L368D/K370S; S364K: L368D/K370S; S364K:L368E/K370S; D401K:T411E/K360E/Q362E; and T366W:T366S/L368A/Y407V, wherein numbering is according to EU numbering. In some embodiments, the first and second Fc domains comprise heterodimerization skew variants S364K/E357Q:L368D/K370S.

[0014] In some embodiments, the first and second Fc domains each comprise one or more ablation variants. In some embodiments, the one or more ablation variants are E233P/L234V/L235A/G236del/S267K, wherein numbering is according to EU numbering.

[0015] In certain embodiments, one of the first or second monomer comprises one or more pI variants. In some embodiments, the CH1-hinge-CH2-CH3 of the first monomer comprises pI variants N208D/Q295E/N384D/Q418E/N421D, wherein numbering is according to EU numbering.

[0016] In some embodiments, the first Fc domain comprises amino acid variants L368D/K370S/N208D/Q295E/N384D/Q418E/N421D/E233P/L234V/L235A/G236del/S267K, and the CH1-hinge-CH2-CH3 of the second monomer comprises amino acid variants S364K/E357Q/E233P/L234V/L235A/G236del/S267K, and wherein numbering is according to EU numbering.

[0017] In some embodiments, the first and second Fc domains each further comprise amino acid variants 428/434S.

[0018] In some embodiments, a) the PD-L1 binding domain comprises a variable heavy domain having the amino acid sequence of SEQ ID NO:3251, and a variable light domain having the amino acid sequence of SEQ ID NO:3239; b) the PD-L2 binding domain comprises a variable heavy domain having the amino acid sequence of SEQ ID NO:3319, and a variable light domain having the amino acid sequence of SEQ ID NO:3239; and c) the CD28 binding domain comprises a variable heavy domain having the amino acid sequence of SEQ ID NO:3380, and a variable light domain having the amino acid sequence of SEQ ID NO:3239.

[0019] In some embodiments, a) the first monomer has the amino acid sequence of SEQ ID NO:3201; b) the second monomer has the amino acid sequence of SEQ ID NO:3202; and c) the first, second, and third common light chains each have the amino acid sequence of SEQ ID NO:3203.

[0020] In one aspect, provided herein are novel 1+1+1 stackFab₂-scFv-Fc format antibodies (FIG. 83A). The 1+1+1 stackFab₂-scFv-Fc format includes a) a first monomer, b) second monomer, and c) a first and second common light chain. The first monomer includes from N-terminal to C-terminal, scFv-linker-CH2-CH3 wherein CH2-CH3 is a first Fc domain. The second monomer includes from N-terminal to C-terminal, VH1-CH1-linker-VH2-CH1-hinge-CH2-CH3 wherein VH1 is a first variable heavy domain, VH2 is a second variable heavy domain, and CH2-CH3 is a second Fc domain. The first and second common light chains each include from N-terminal to C-terminal, VL1-CL, wherein VL1 is a first variable light domain and CL is a constant light domain. Further, the scFv comprises a third VH domain (VH3), a scFv linker, and a second variable light domain (VL2). In this format, the first variable heavy domain and the first variable light domain of the first common light chain form a first antigen binding domain, the second variable heavy domain and the first variable light domain of the second common light chain form a second antigen binding domain, and the third variable heavy domain and second variable light domain form a third antigen binding domain.

[0021] In some embodiments, the antibody is a trispecific antibody that binds PD-L1, PD-L2, and CD28, and each of the first antigen binding domain, second antigen binding domain, and third antigen binding domain is selected from the group consisting of a PD-L1 antigen binding domain, a PD-L2 antigen binding domain, and a CD 28 binding domain.

[0022] In some embodiments, the first antigen binding domain, the second antigen binding domain, and the third antigen binding domain are selected from the following:

[0023] i) the first antigen binding domain is the PD-L1 binding domain, the second antigen binding domain is the PD-L2 binding domain, and the third antigen binding domain is the CD28 binding domain, ii) the first antigen binding domain is the PD-L1 binding domain, the second antigen binding domain is the CD28 binding domain, and the third antigen binding domain is the PD-L2 binding domain, iii) the first antigen binding domain is the PD-L2 binding domain, the second antigen binding domain is the PD-L1 binding domain, and the third antigen binding domain is the CD28 binding domain, iv) the first antigen binding domain is the PD-L2 binding domain, the second antigen binding domain is the CD28 binding domain, and the third antigen binding domain is the PD-L1 binding domain, v) the first antigen binding domain is the CD28 binding domain, the second antigen binding domain is the PD-L1 binding domain, and the third antigen binding domain is the PD-L2 binding domain, or vi) the first antigen binding domain is the CD28 binding domain, the second antigen binding domain is the PD-L2 binding domain, and the third antigen binding domain is the PD-L1 binding domain.

[0024] In some embodiments, the CD28 binding domain comprises a variable heavy domain and variable light domain selected from the following: i) a variable heavy domain selected from any of the variable heavy domains in FIGS. 35, 36, 38, and a variable light domain selected from any of the variable light domains in FIGS. 35, 37 and 38, ii) a variable heavy domain and a variable light domain of a CD28 binding domain in FIG. 38, iii) a variable heavy domain selected from any of the variable heavy domains in FIGS. 41-74, and a variable light domain selected from any of the variable light domains in FIGS. 41-74, iv) a variable heavy domain and variable light domain of a CD28 binding domain in FIGS. 41-74, v) a variable heavy domain selected from any of the variable light domains in FIGS. 41-74, and a variable light domain having the amino acid sequence of SEQ ID NO:20 (FIG. 24), vi) a variable heavy domain and variable light domain of a CD28 binding domains in FIG. 81, and vii) a variable heavy domain selected from any of the variable heavy domains in FIG. 163, and a variable light domain of selected from any of the variable light domains in FIGS. 35 and 37, or a variable light domain having the amino acid sequence of SEQ ID NO:3239.

[0025] In some embodiments, the PD-L1 antigen binding domain comprises a variable heavy domain and a variable light domain selected from the following: i) a variable heavy domain selected from any of the variable heavy domains in FIGS. 17 and 19, and a variable light domain selected from any of the variable light domains in FIGS. 17 and 20, ii) a variable heavy domain and variable light domain of a PD-L1 binding domain in FIGS. 17 and 21, iii) a variable heavy domain selected from any of the variable heavy domains in FIGS. 25 and 26, and a variable light domain selected from any of the variable light domains in FIGS. 25 and 26, iv) a variable heavy domain and variable light domain of a PD-L1 binding domain in FIGS. 25 and 26, v) a variable heavy domain selected from any of the variable heavy domains in FIGS. 25 and 26, and a variable light domain having the amino acid sequence of SEQ ID NO:20 (FIG. 24), vi) a variable heavy domain and variable light domain of a PD-L1 binding domain in FIG. 28; and vii) a variable heavy domain selected from any of the variable heavy domains in FIG. 161, and a variable light domain having the amino acid sequence of SEQ ID NO:3239.

[0026] In some embodiments, the PD-L2 antigen binding domain comprises a variable heavy domain and a variable light domain selected from the following: i) a variable heavy domain selected from any of the variable heavy domains in FIGS. 29-32, and a variable light domain selected from any of the variable light domains in in FIGS. 29-32, ii) a variable heavy domain and variable light domain of a PD-L2 binding domain in FIGS. 29-32, iii) a variable heavy domain selected from any of the variable heavy domains in FIGS. 29-32, and a variable light domain having the amino acid sequence of SEQ ID NO:20 (FIG. 24), iv) a variable heavy domain and variable light domain of a PD-L2 binding domain in FIG. 34, and v) a variable heavy domain selected from any of the variable heavy domains in FIG. 162, and a variable light domain having the amino acid sequence of SEQ ID NO:3239.

[0027] In some embodiments, the first and second Fc domains are variant Fc domains. In certain embodiments, the first and second Fc domains comprise a set of heterodimerization skew variants selected from the group consisting of S364K/E357Q:L368D/K370S; S364K: L368D/K370S; S364K:L368E/K370S; D401K:T411E/K360E/Q362E; and T366W:T366S/L368A/Y407V, wherein numbering is according to EU numbering. In some embodiments, the first and second Fc domains comprise heterodimerization skew variants S364K/E357Q:L368D/K370S.

[0028] In some embodiments, the first and second Fc domains each comprise one or more ablation variants. In some embodiments, the one or more ablation variants are E233P/L234V/L235A/G236del/S267K, wherein numbering is according to EU numbering.

[0029] In some embodiments, one of the first or second monomer comprises one or more pI variants. In some embodiments, the CH1-hinge-CH2-CH3 of the second monomer comprises pI variants N208D/Q295E/N384D/Q418E/N421D, wherein numbering is according to EU numbering.

[0030] In some embodiments, the first Fc domain comprises amino acid variants S364K/E357Q/E233P/L234V/L235A/G236del/S267K, the CH1-hinge-CH2-CH3 of the second monomer comprises amino acid variants L368D/K370S/N208D/Q295E/N384D/Q418E/N421D/E233P/L234V/L235A/G236del/S267K, and numbering is according to EU numbering.

[0031] In some embodiments, the scFv linker is a charged scFv linker having the amino acid sequence (GKPGS)₄. In some embodiments, the first and second Fc domains each further comprise amino acid variants 428/434S.

[0032] In one aspect, provided herein are novel 1+1+1 Fab-(Fab-scFv)-Fc format antibodies (FIG. 83B). The 1+1+1 Fab-(Fab-scFv)-Fc format includes a) a first monomer, b) second monomer and c) a first and second common light chain. The first monomer includes from N-terminal to C-terminal, VH1-CH1-linker-scFv-linker-CH2-CH3 wherein VH1 is a first variable heavy domain, and CH2-CH3 is a first Fc domain. The second monomer includes from N-terminal to C-terminal, VH2-CH1-hinge-CH2-CH3 wherein VH2 is a second variable heavy domain, and CH2-CH3 is a second Fc domain. The first and second common light chains each include from N-terminal to C-terminal, VL1-CL, wherein VL1 is a first variable light domain and CL is a constant light domain. Further, the scFv comprises a third VH domain (VH3), a scFv linker, and a second variable light domain (VL2). In this format, the first variable heavy domain and the first variable light domain of the first common light chain form a first antigen binding domain, the second variable heavy domain and the first variable light domain of the second common light chain form a second antigen binding domain, and the third variable heavy domain and second variable light domain form a third antigen binding domain.

[0033] In some embodiments, the antibody is a trispecific antibody that binds PD-L1, PD-L2, and CD28, and each of the first antigen binding domain, second antigen binding domain, and third antigen binding domain is selected from the group consisting of a PD-L1 antigen binding domain, a PD-L2 antigen binding domain, and a CD 28 binding domain.

[0034] In some embodiments, the first antigen binding domain, the second antigen binding domain, and the third antigen binding domain are selected from the following:

[0035] i) the first antigen binding domain is the PD-L1 binding domain, the second antigen binding domain is the PD-L2 binding domain, and the third antigen binding domain is the CD28 binding domain, ii) the first antigen binding domain is the PD-L1 binding domain, the second antigen binding domain is the CD28 binding domain, and the third antigen binding domain is the PD-L2 binding domain, iii) the first antigen binding domain is the PD-L2 binding domain, the second antigen binding domain is the PD-L1 binding domain, and the third antigen binding domain is the CD28 binding domain, iv) the first antigen binding domain is the PD-L2 binding domain, the second antigen binding domain is the CD28 binding domain, and the third antigen binding domain is the PD-L1 binding domain, v) the first antigen binding domain is the CD28 binding domain, the second antigen binding domain is the PD-L1 binding domain, and the third antigen binding domain is the PD-L2 binding domain, or vi) the first antigen binding domain is the CD28 binding domain, the second antigen binding domain is the PD-L2 binding domain, and the third antigen binding domain is the PD-L1 binding domain.

[0036] In some embodiments, the CD28 binding domain comprises a variable heavy domain and variable light domain selected from the following: i) a variable heavy domain selected from any of the variable heavy domains in FIGS. 35, 36, 38, and a variable light domain selected from any of the variable light domains in FIGS. 35, 37 and 38, ii) a variable heavy domain and a variable light domain of a CD28 binding domain in FIG. 38, iii) a variable heavy domain selected from any of the variable heavy domains in FIGS. 41-74, and a variable light domain selected from any of the variable light domains in FIGS. 41-74, iv) a variable heavy domain and variable light domain of a CD28 binding domain in FIGS. 41-74, v) a variable heavy domain selected from any of the variable light domains in FIGS. 41-74, and a variable light domain having the amino acid sequence of SEQ ID NO:20 (FIG. 24), vi) a variable heavy domain and variable light domain of a CD28 binding domains in FIG. 81, and vii) a variable heavy domain selected from any of the variable heavy domains in FIG. 163, and a variable light domain of selected from any of the variable light domains in FIGS. 35 and 37, or a variable light domain having the amino acid sequence of SEQ ID NO:3239.

[0037] In some embodiments, the PD-L1 antigen binding domain comprises a variable heavy domain and a variable light domain selected from the following: i) a variable heavy domain selected from any of the variable heavy domains in FIGS. 17 and 19, and a variable light domain selected from any of the variable light domains in FIGS. 17 and 20, ii) a variable heavy domain and variable light domain of a PD-L1 binding domain in FIGS. 17 and 21, iii) a variable heavy domain selected from any of the variable heavy domains in FIGS. 25 and 26, and a variable light domain selected from any of the variable light domains in FIGS. 25 and 26, iv) a variable heavy domain and variable light domain of a PD-L1 binding domain in FIGS. 25 and 26, v) a variable heavy domain selected from any of the variable heavy domains in FIGS. 25 and 26, and a variable light domain having the amino acid sequence of SEQ ID NO:20 (FIG. 24), vi) a variable heavy domain and variable light domain of a PD-L1 binding domain in FIG. 28; and vii) a variable heavy domain selected from any of the variable heavy domains in FIG. 161, and a variable light domain having the amino acid sequence of SEQ ID NO:3239.

[0038] In some embodiments, the PD-L2 antigen binding domain comprises a variable heavy domain and a variable light domain selected from the following: i) a variable heavy domain selected from any of the variable heavy domains in FIGS. 29-32, and a variable light domain selected from any of the variable light domains in in FIGS. 29-32, ii) a variable heavy domain and variable light domain of a PD-L2 binding domain in FIGS. 29-32, iii) a variable heavy domain selected from any of the variable heavy domains in FIGS. 29-32, and a variable light domain having the amino acid sequence of SEQ ID NO:20 (FIG. 24), iv) a variable heavy domain and variable light domain of a PD-L2 binding domain in FIG. 34, and v) a variable heavy domain selected from any of the variable heavy domains in FIG. 162, and a variable light domain having the amino acid sequence of SEQ ID NO:3239.

[0039] In some embodiments, the first and second Fc domains are variant Fc domains. In certain embodiments, the first and second Fc domains comprise a set of heterodimerization skew variants selected from the group consisting of S364K/E357Q:L368D/K370S; S364K: L368D/K370S; S364K:L368E/K370S; D401K:T411E/K360E/Q362E; and T366W:T366S/L368A/Y407V, wherein numbering is according to EU numbering. In some embodiments, the first and second Fc domains comprise heterodimerization skew variants S364K/E357Q:L368D/K370S.

[0040] In some embodiments, the first and second Fc domains each comprise one or more ablation variants. In some embodiments, the one or more ablation variants are E233P/L234V/L235A/G236del/S267K, wherein numbering is according to EU numbering.

[0041] In some embodiments, one of the first or second monomer comprises one or more pI variants. In some embodiments, the CH1-hinge-CH2-CH3 of the second monomer comprises pI variants N208D/Q295E/N384D/Q418E/N421D, wherein numbering is according to EU numbering.

[0042] In some embodiments, the first Fc domain comprises amino acid variants S364K/E357Q/E233P/L234V/L235A/G236del/S267K, the CH1-hinge-CH2-CH3 of the second monomer comprises amino acid variants L368D/K370S/N208D/Q295E/N384D/Q418E/N421D/E233P/L234V/L235A/G236del/S267K, and numbering is according to EU numbering.

[0043] In some embodiments, the scFv linker is a charged scFv linker having the amino acid sequence (GKPGS)₄. In some embodiments, the first and second Fc domains each further comprise amino acid variants 428/434S.

[0044] In one aspect, provided herein are novel 1+1+1 mAb-scFv format antibodies (FIG. 83C). The 1+1+1 mAb-scFv format antibody generally includes a) a first monomer, b) a second monomer, and c) first and second common light chain. The first monomer includes from N-terminal to C-terminal, VH1-CH1-hinge-CH2-CH3-domain linker-scFv, wherein VH1 is a first variable heavy domain, and CH2-CH3 is a first Fc domain. The second monomer includes from N-terminal to C-terminal, a VH2-CH1-hinge-CH2-CH3, wherein VH2 is a second variable heavy domain and CH2-CH3 is a second Fc domain. The first and second common light chains each include from N-terminal to C-terminal, VL1-CL, wherein VL1 is a first variable light domain and CL is a constant light domain. Further, the scFv comprises a third VH domain (VH3), a scFv linker, and a second variable light domain (VL2). In this format, the first variable heavy domain and the first variable light domain of the first common light chain form a first antigen binding domain, the second variable heavy domain and the first variable light domain of the second common light chain form a second antigen binding domain, and the third variable heavy domain and second variable light domain form a third antigen binding domain.

[0045] In some embodiments, the antibody is a trispecific antibody that binds PD-L1, PD-L2, and CD28, and each of the first antigen binding domain, second antigen binding domain, and third antigen binding domain is selected from the group consisting of a PD-L1 antigen binding domain, a PD-L2 antigen binding domain, and a CD 28 binding domain.

[0046] In some embodiments, the first antigen binding domain, the second antigen binding domain, and the third antigen binding domain are selected from the following:

[0047] i) the first antigen binding domain is the PD-L1 binding domain, the second antigen binding domain is the PD-L2 binding domain, and the third antigen binding domain is the CD28 binding domain, ii) the first antigen binding domain is the PD-L1 binding domain, the second antigen binding domain is the CD28 binding domain, and the third antigen binding domain is the PD-L2 binding domain, iii) the first antigen binding domain is the PD-L2 binding domain, the second antigen binding domain is the PD-L1 binding domain, and the third antigen binding domain is the CD28 binding domain, iv) the first antigen binding domain is the PD-L2 binding domain, the second antigen binding domain is the CD28 binding domain, and the third antigen binding domain is the PD-L1 binding domain, v) the first antigen binding domain is the CD28 binding domain, the second antigen binding domain is the PD-L1 binding domain, and the third antigen binding domain is the PD-L2 binding domain, or vi) the first antigen binding domain is the CD28 binding domain, the second antigen binding domain is the PD-L2 binding domain, and the third antigen binding domain is the PD-L1 binding domain.

[0048] In some embodiments, the CD28 binding domain comprises a variable heavy domain and variable light domain selected from the following: i) a variable heavy domain selected from any of the variable heavy domains in FIGS. 35, 36, 38, and a variable light domain selected from any of the variable light domains in FIGS. 35, 37 and 38, ii) a variable heavy domain and a variable light domain of a CD28 binding domain in FIG. 38, iii) a variable heavy domain selected from any of the variable heavy domains in FIGS. 41-74, and a variable light domain selected from any of the variable light domains in FIGS. 41-74, iv) a variable heavy domain and variable light domain of a CD28 binding domain in FIGS. 41-74, v) a variable heavy domain selected from any of the variable light domains in FIGS. 41-74, and a variable light domain having the amino acid sequence of SEQ ID NO:20 (FIG. 24), vi) a variable heavy domain and variable light domain of a CD28 binding domains in FIG. 81, and vii) a variable heavy domain selected from any of the variable heavy domains in FIG. 163, and a variable light domain of selected from any of the variable light domains in FIGS. 35 and 37, or a variable light domain having the amino acid sequence of SEQ ID NO:3239.

[0049] In some embodiments, the PD-L1 antigen binding domain comprises a variable heavy domain and a variable light domain selected from the following: i) a variable heavy domain selected from any of the variable heavy domains in FIGS. 17 and 19, and a variable light domain selected from any of the variable light domains in FIGS. 17 and 20, ii) a variable heavy domain and variable light domain of a PD-L1 binding domain in FIGS. 17 and 21, iii) a variable heavy domain selected from any of the variable heavy domains in FIGS. 25 and 26, and a variable light domain selected from any of the variable light domains in FIGS. 25 and 26, iv) a variable heavy domain and variable light domain of a PD-L1 binding domain in FIGS. 25 and 26, v) a variable heavy domain selected from any of the variable heavy domains in FIGS. 25 and 26, and a variable light domain having the amino acid sequence of SEQ ID NO:20 (FIG. 24), vi) a variable heavy domain and variable light domain of a PD-L1 binding domain in FIG. 28; and vii) a variable heavy domain selected from any of the variable heavy domains in FIG. 161, and a variable light domain having the amino acid sequence of SEQ ID NO:3239.

[0050] In some embodiments, the PD-L2 antigen binding domain comprises a variable heavy domain and a variable light domain selected from the following: i) a variable heavy domain selected from any of the variable heavy domains in FIGS. 29-32, and a variable light domain selected from any of the variable light domains in in FIGS. 29-32, ii) a variable heavy domain and variable light domain of a PD-L2 binding domain in FIGS. 29-32, iii) a variable heavy domain selected from any of the variable heavy domains in FIGS. 29-32, and a variable light domain having the amino acid sequence of SEQ ID NO:20 (FIG. 24), iv) a variable heavy domain and variable light domain of a PD-L2 binding domain in FIG. 34, and v) a variable heavy domain selected from any of the variable heavy domains in FIG. 162, and a variable light domain having the amino acid sequence of SEQ ID NO:3239.

[0051] In some embodiments, the first and second Fc domains are variant Fc domains. In certain embodiments, the first and second Fc domains comprise a set of heterodimerization skew variants selected from the group consisting of S364K/E357Q:L368D/K370S; S364K: L368D/K370S; S364K:L368E/K370S; D401K:T411E/K360E/Q362E; and T366W:T366S/L368A/Y407V, wherein numbering is according to EU numbering. In some embodiments, the first and second Fc domains comprise heterodimerization skew variants S364K/E357Q:L368D/K370S.

[0052] In some embodiments, the first and second Fc domains each comprise one or more ablation variants. In some embodiments, the one or more ablation variants are E233P/L234V/L235A/G236del/S267K, wherein numbering is according to EU numbering.

[0053] In some embodiments, one of the first or second monomer comprises one or more pI variants. In some embodiments, the CH1-hinge-CH2-CH3 of the second monomer comprises pI variants N208D/Q295E/N384D/Q418E/N421D, wherein numbering is according to EU numbering.

[0054] In some embodiments, the first Fe domain comprises amino acid variants S364K/E357Q/E233P/L234V/L235A/G236del/S267K, the CH1-hinge-CH2-CH3 of the second monomer comprises amino acid variants L368D/K370S/N208D/Q295E/N384D/Q418E/N421D/E233P/L234V/L235A/G236del/S267K, and numbering is according to EU numbering.

[0055] In some embodiments, the scFv linker is a charged scFv linker having the amino acid sequence (GKPGS)₄. In some embodiments, the first and second Fc domains each further comprise amino acid variants 428/434S.

[0056] In another aspect, provided herein is a method of treating a cancer comprising administering to a patient in need thereof a subject antibody disclosed herein or a pharmaceutical composition comprising the subject antibody and a pharmaceutically acceptable carrier. In some embodiments, the method further comprises administering an anti-CD3×tumor target antigen (TTA) bispecific antibody to the patient.

[0057] Also provided herein are nucleic acid compositions encoding the compositions and antibodies provided herein, expression vectors that include such nucleic acids, and host cells that include the nucleic acids and expression vectors.

[0058] In another aspect, provided herein is a method of treating a cancer that includes administering to a patient in need thereof one of the subject antibodies provided herein. In some embodiments, the method further includes administering an anti-CD3×tumor target antigen bispecific antibody to the patient.

[0059] In another aspect, provided herein is a composition comprising a CD28 antigen binding domain, wherein the CD28 binding domain comprises: a) a variable heavy domain having the vhCDR1-3 of a variable heavy domain in FIG. 163; and b) a variable light domain having the vlCDR1-3 of a variable light domain in FIGS. 35 and 37, or a variable light domain having the amino acid sequence of SEQ ID NO:3239.

[0060] In another aspect provided herein is a CD28 antigen binding domain, wherein the CD28 binding domain comprises: a) a variable heavy domain having at least 85%, 90%, 95%, or 99% sequence identity to a variable heavy domain in FIG. 163; and b) a variable light domain having at least 85%, 90%, 95%, or 99% sequence identity to a variable light domain in FIGS. 35 and 37, or a variable light domain having the amino acid sequence of SEQ ID NO:3239. In some embodiments, the variable heavy domain has an amino acid sequence of a variable heavy domain in FIG. 163; and the variable light domain has an amino acid sequence of a variable light domain in FIGS. 35 and 37, or a variable light domain having the amino acid sequence of SEQ ID NO:3239.

[0061] In another aspect, provided herein is a composition comprising a PD-L1 antigen binding domain, wherein the PD-L1 binding domain comprises: a) a variable heavy domain having the vhCDR1-3 of a variable heavy domain in FIG. 161; and b) a variable light domain having the vlCDR1-3 of a variable light domain having the amino acid sequence of SEQ ID NO:3239.

[0062] In another aspect, provided herein is a composition comprising a PD-L1 antigen binding domain, wherein the PD-L1 binding domain comprises: a) a variable heavy domain having at least 85%, 90%, 95%, or 99% sequence identity to a variable heavy domain in FIG. 161; and b) a variable light domain having at least 85%, 90%, 95%, or 99% sequence identity to a variable light domain having the amino acid sequence of SEQ ID NO:3239. In some embodiments, the variable heavy domain has an amino acid sequence of a variable heavy domain in FIG. 161; and the variable light domain has an amino acid sequence of a variable light domain having the amino acid sequence of SEQ ID NO:3239.

[0063] In another aspect, provided herein is a composition comprising a PD-L2 antigen binding domain, wherein the PD-L1 binding domain comprises: a) a variable heavy domain having the vhCDR1-3 of a variable heavy domain in FIG. 162; and b) a variable light domain having the vlCDR1-3 of a variable light domain having the amino acid sequence of SEQ ID NO:3239.

[0064] In another aspect, provided herein is a composition comprising a PD-L2 antigen binding domain, wherein the PD-L1 binding domain comprises: a) a variable heavy domain having at least 85% sequence identity to a variable heavy domain in FIG. 162; and b) a variable light domain having at least 85% sequence identity to a variable light domain having the amino acid sequence of SEQ ID NO:3239. In some embodiments, the variable heavy domain has an amino acid sequence of a variable heavy domain in FIG. 162; and the variable light domain has an amino acid sequence of a variable light domain having the amino acid sequence of SEQ ID NO:3239.

### BRIEF DESCRIPTION OF THE DRAWINGS

[0065] FIG. 1 depicts the sequences for human, mouse, and cynomolgus PDL1. Such PDL1 are useful for the development of cross-reactive PDL1 antigen binding domains for ease of clinical development.

[0066] FIG. 2 depicts the sequences for human, mouse, and cynomolgus PDL2. Such PDL2 are useful for the development of cross-reactive PDL2 antigen binding domains for ease of clinical development.

[0067] FIGS. 3A-3B depict the sequences for human, mouse, and cynomolgus CD28. Such CD28 are useful for the development of cross-reactive CD28 antigen binding domains for ease of clinical development.

[0068] FIGS. 4A-4F depict useful pairs of heterodimerization variant sets (including skew and pI variants). In FIG. 4F, there are variants for which there are no corresponding “monomer 2” variants. Such variants are pI variants that can be used alone on either monomer of a bispecific antibody (e.g., αPD-L1×αCD28 bsAb) or a trispecific antibody (e.g., PDL1×PDL2×CD28 triAb), or included, for example, on the non-scFv side of a format that utilizes an scFv having an appropriately charged scFv linker as a component on the second monomer (suitable charged linkers are shown in FIG. 7). Heterodimer yield (%) and CH3 Tₘ (° C.) of preferred Fc heterodimerization variants were previously described (see, e.g., FIG. 8 of U.S. Patent Application No. 2019/0248898).

[0069] FIG. 5 depicts a list of isosteric variant antibody constant regions and their respective substitutions. pI_(−) indicates lower pI variants, while pI_(+) indicates higher pI variants. These variants can be optionally and independently combined with other variants, including heterodimerization variants, outlined herein.

[0070] FIG. 6 depict useful ablation variants that ablate FcγR binding (also referred to as “knockouts” or “KO” variants). In some embodiments, such ablation variants are included in the Fc domain of both monomers of the subject antibody described herein. In other embodiments, the ablation variants are only included on only one variant Fc domain.

[0071] FIG. 7 depicts a number of charged scFv linkers that find use in increasing or decreasing the pI of the subject multimeric bispecific and trispecific antibodies that utilize one or more scFv as a component, as described herein (e.g., PDL1×CD28 bsAbs). The (+H) positive linker finds particular use herein, particularly with anti-CD28 VL and VH sequences shown herein. A single prior art scFv linker with a single charge is referenced as “Whitlow,” from Whitlow et al., Protein Engineering 6(8):989-995 (1993). It should be noted that this linker was used for reducing aggregation and enhancing proteolytic stability in scFvs. Such charged scFv linkers can be used in any of the subject antibody formats disclosed herein that include scFvs (e.g., 1+1 Fab-scFv-Fc, 2+1 Fab2-scFv-Fc formats, etc.).

[0072] FIGS. 8A-8B depicts a number of exemplary domain linkers. In some embodiments, these linkers find use linking a single-chain Fv to an Fc chain. In some embodiments, these linkers may be combined in any orientation. For example, a GGGGS linker may be combined with a “lower half hinge” linker at the N-terminus or at the C-terminus.

[0073] FIG. 9 shows a particularly useful embodiment of the heterodimeric Fc domains (i.e. CH2-CH3 in this embodiment) of the PDL1×CD28 and PDL2×CD28 bsAbs and PDL1×PDL2×CD28 triAbs of the invention.

[0074] FIG. 10 shows the sequences of several useful multimeric PDL1×CD28 and PDL2×CD28 bispecific antibodies (bsAbs) or PDL1×PDL2×CD28 trispecific antibodies (triAbs) backbones based on human IgG1, without the cytokine sequences. Heterodimeric Fc backbone 1 is based on human IgG1 (356E/358M allotype), and includes the L368D/K370S skew variants and the Q295E/N384D/Q418E/N421D pI variants on a first heterodimeric Fc chain, the S364K/E357Q skew variants on a second heterodimeric Fc chain, and the E233P/L234V/L235A/G236del/S267K ablation variants on both chains. Heterodimeric Fc backbone 2 is based on human IgG1 (356E/358M allotype), and includes the L368D/K370S skew variants and the Q295E/N384D/Q418E/N421D pI variants on a first heterodimeric Fc chain, the S364K skew variant on a second heterodimeric Fc chain, and the E233P/L234V/L235A/G236del/S267K ablation variants on both chains. Heterodimeric Fc backbone 3 is based on human IgG1 (356E/358M allotype), and includes the L368E/K370S skew variants and the Q295E/N384D/Q418E/N421D pI variants on a first heterodimeric Fc chain, the S364K skew variant on a second heterodimeric Fc chain, and the E233P/L234V/L235A/G236del/S267K ablation variants on both chains. Heterodimeric Fc backbone 4 is based on human IgG1 (356E/358M allotype), and includes the K360E/Q362E/T411E skew variants and the Q295E/N384D/Q418E/N421D pI variants on a first heterodimeric Fc chain, the D401K skew variant on a second heterodimeric Fc chain, and the E233P/L234V/L235A/G236del/S267K ablation variants on both chains. Heterodimeric Fc backbone 5 is based on human IgG1 (356D/358L allotype), and includes the L368D/K370S skew variants and the Q295E/N384D/Q418E/N421D pI variants on a first heterodimeric Fc chain, the S364K/E357Q skew variants on a second heterodimeric Fc chain, and the E233P/L234V/L235A/G236del/S267K ablation variants on both chains. Heterodimeric Fc backbone 6 is based on human IgG1 (356E/358M allotype), and includes the L368D/K370S skew variants and the Q295E/N384D/Q418E/N421D pI variants on a first heterodimeric Fc chain, the S364K/E357Q skew variants on a second heterodimeric Fc chain, and the E233P/L234V/L235A/G236del/S267K ablation variants and N297A variant that removes glycosylation on both chains. Heterodimeric Fc backbone 7 is based on human IgG1 (356E/358M allotype), and includes the L368D/K370S skew variants and the Q295E/N384D/Q418E/N421D pI variants on a first heterodimeric Fc chain, the S364K/E357Q skew variants on a second heterodimeric Fc chain, and the E233P/L234V/L235A/G236del/S267K ablation variants and N297S variant that removes glycosylation on both chains. Heterodimeric Fc backbone 8 is based on human IgG4, and includes the L368D/K370S skew variants and the Q295E/N384D/Q418E/N421D pI variants on a first heterodimeric Fc chain, the S364K/E357Q skew variants on a second heterodimeric Fc chain, and the S228P (according to EU numbering, S241P in Kabat) variant that ablates Fab arm exchange (as is known in the art) on both chains. Heterodimeric Fc backbone 9 is based on human IgG2, and includes the L368D/K370S skew variants and the Q295E/N384D/Q418E/N421D pI variants on a first heterodimeric Fc chain, the S364K/E357Q skew variants on a second heterodimeric Fc chain. Heterodimeric Fc backbone 10 is based on human IgG2, and includes the L368D/K370S skew variants and the Q295E/N384D/Q418E/N421D pI variants on a first heterodimeric Fc chain, the S364K/E357Q skew variants on a second heterodimeric Fc chain, and the S267K ablation variant on both chains. Heterodimeric Fc backbone 11 is based on human IgG1 (356E/358M allotype), and includes the L368D/K370S skew variants and the Q295E/N384D/Q418E/N421D pI variants on a first heterodimeric Fc chain, the S364K/E357Q skew variants on a second heterodimeric Fc chain, and the E233P/L234V/L235A/G236del/S267K ablation variants and M428L/N434S Xtend variants on both chains. Heterodimeric Fc backbone 12 is based on human IgG1 (356E/358M allotype), and includes the L368D/K370S skew variants on a first heterodimeric Fc chain, the S364K/E357Q skew variants and P217R/P229R/N276K pI variants on a second heterodimeric Fc chain, and the E233P/L234V/L235A/G236del/S267K ablation variants on both chains. Heterodimeric Fc backbone 13 is based on human IgG1 (356D/358L allotype), and includes the L368D/K370S skew variants and the Q295E/N384D/Q418E/N421D pI variants on a first heterodimeric Fc chain, the S364K/E357Q skew variants on a second heterodimeric Fc chain, and the E233P/L234V/L235A/G236del/S267K ablation variants and M428L/N434S Xtend variants on both chains. Heterodimeric Fc backbone 14 is based on human IgG1 (356E/358M allotype), and includes the L368D/K370S skew variants and the Q295E/N384D/Q418E/N421D pI variants on a first heterodimeric Fc chain, the S364K/E357Q skew variants on a second heterodimeric Fc chain, and the E233P/L234V/L235A/G236del/S267K ablation variants and M428L/N434A Xtend variants on both chains. Heterodimeric Fc backbone 15 is based on human IgG1 (356D/358L allotype), and includes the L368D/K370S skew variants and the Q295E/N384D/Q418E/N421D pI variants on a first heterodimeric Fc chain, the S364K/E357Q skew variants on a second heterodimeric Fc chain, and the E233P/L234V/L235A/G236del/S267K ablation variants and M428L/N434A Xtend variants on both chains.

[0075] Included within each of these backbones are sequences that are 90, 95, 98 and 99% identical (as defined herein) to the recited sequences, and/or contain from 1, 2, 3, 4, 5, 6, 7, 8, 9 or 10 additional amino acid substitutions (as compared to the “parent” of the Figure, which, as will be appreciated by those in the art, already contain a number of amino acid modifications as compared to the parental human IgG1 (or IgG2 or IgG4, depending on the backbone). That is, the recited backbones may contain additional amino acid modifications (generally amino acid substitutions) in addition or as an alternative to the skew, pI and ablation variants contained within the backbones of this Figure. Additionally, the backbones depicted herein may include deletion of the C-terminal glycine (K446_) and/or lysine (K447_). The C-terminal glycine and/or lysine deletion may be intentionally engineered to reduce heterogeneity or in the context of certain bispecific formats, such as the mAb-scFv format. Additionally, C-terminal glycine and/or lysine deletion may occur naturally for example during production and storage. Additionally, these sequences may include the H435R/Y436F variant in either of monomer 1 or monomer 2 for facile purification.

[0076] FIG. 11 depicts illustrative sequences of backbone for use in the 2+1 mAb-scFv and 1+1+1 mAb-scFv formats. The format depicted here is based on heterodimeric Fc backbone 1 as depicted in Figure X, except further including G446_ on monomer 1 (−) and G446_/K447_ on monomer 2 (+). It should be noted that any of the additional backbones depicted in Figure X may be adapted for use in the 2+1 mAb-scFv format with or without including K447_ on one or both chains. It should be noted that these sequences may further include the M428L/N434S variants. Additionally, these sequences may include the H435R/Y436F variant in either of monomer 1 or monomer 2 for facile purification.

[0077] FIG. 12 depicts sequences for “CH1” that find use in embodiments of the bsAbs and triAbs of the invention.

[0078] FIG. 13 depicts sequences for “hinge” that find use in embodiments of bsAbs ant triAbs of the invention.

[0079] FIG. 14 depicts the constant domain of the cognate light chains that find use in the subject PDL1×CD28 or PDL2×CD28 bsAbs and PDL1×PDL2×CD28 triAbs that utilize a Fab binding domain.

[0080] FIGS. 15A-15F depict sequences for exemplary anti-CD3 binding domains suitable for use in CD3 bispecific antibodies which may be combined with the CD28 bispecific or trispecific antibodies of the invention. The CDRs are underlined, the scFv linker is double underlined (in the sequences, the scFv linker is a positively charged scFv (GKPGS)4 linker (SEQ ID NO: 892), although as will be appreciated by those in the art, this linker can be replaced by other linkers, including uncharged or negatively charged linkers, some of which are depicted in FIG. 6), and the slashes indicate the border(s) of the variable domains. In addition, the naming convention illustrates the orientation of the scFv from N- to C-terminus. As noted herein and is true for every sequence herein containing CDRs, the exact identification of the CDR locations may be slightly different depending on the numbering used as is shown in Table 2, and thus included herein are not only the CDRs that are underlined but also CDRs included within the VH and VL domains using other numbering systems. Furthermore, as for all the sequences in the Figures, these VH and VL sequences can be used either in a scFv format or in a Fab format.

[0081] FIG. 16 depict the sequences for illustrative αPSMA×αCD3 bsAbs in the 2+1 Fab2-scFv-Fc format and respectively comprising a H1.30_L1.47 anti-CD3 scFv (a.k.a. CD3 High [VHVL]) or a L1.47_H1.32 anti-CD3 scFv (a.k.a. CD3 High-Int #1 [VLVH]). CDRs are underlined and slashes indicate the border(s) between the variable regions and other chain components (e.g. constant region and domain linkers). It should be noted that the αPSMA×αCD3 bsAbs can utilize variable region, Fc region, and constant domain sequences that are 90, 95, 98 and 99% identical (as defined herein), and/or contain from 1, 2, 3, 4, 5, 6, 7, 8, 9 or 10 amino acid substitutions. In addition, each sequence outlined herein can include or exclude the M428L/N434S variants in one or preferably both Fc domains, which results in longer half-life in serum.

[0082] FIG. 17 depicts the variable heavy and variable light chain sequences for 2G4, an exemplary humanized hybridoma-derived PDL1 binding domain, as well as the sequences for XENP25859, an anti-PDL1 mAb based on 2G4 and IgG1 backbone with E233P/L234V/L235A/G236del/S267K ablation variant, and XENP36627, a monovalent anti-PDL1 mAb based on 2G4. CDRs are underlined and slashes indicate the border(s) between the variable regions and constant domain. As noted herein and is true for every sequence herein containing CDRs, the exact identification of the CDR locations may be slightly different depending on the numbering used as is shown in Table 2, and thus included herein are not only the CDRs that are underlined but also CDRs included within the VH and VL domains using other numbering systems. Furthermore, as for all the sequences in the Figures, these VH and VL sequences can be used either in a scFv format or in a Fab format.

[0083] FIG. 18 depicts PD1:PDL1 blockade (binding of PDL1-mFc fusion to PD1-transfected HEK293T cells) by anti-PDL1 clone 2G4 (XENP25859), a partial blocking anti-PDL1 (XENP25853), a non-blocking anti-PDL1 (XENP25858), and XENP24118 (a benchmark anti-PDL1 mAb based on avelumab).

[0084] FIG. 19 depicts the sequences for affinity-optimized variable heavy domains from anti-PDL1 clone 2G4. It should be noted that the variable heavy domains can be paired with any of the other 2G4 variable light domains depicted herein including SEQ ID NOs: 1467-1528 (e.g. 2G4_H1.12_L1.14 as utilized in XENP40706).

[0085] FIG. 20 depicts the sequences for affinity-optimized variable light domain from anti-PDL1 clone 2G4. It should be noted that the variable heavy domains can be paired with any of the other 2G4 variable heavy domains depicted herein including SEQ ID NOs: 1529-1599 (e.g. 2G4_H1.12_L1.14 as utilized in XENP40706).

[0086] FIG. 21 depicts the sequence for illustrative affinity-optimized 2G4 VH/VL pairs. It should be noted that these pairs may be formatted as Fabs or as scFvs.

[0087] FIG. 22 depicts consensus framework regions (FR) and complementarity determining regions (CDRs) (as in Kabat) for anti-PDL1 clone 2G4 variable heavy and variable light domain variants.

[0088] FIG. 23 depicts illustrative affinity-engineered 2G4 VH/VL pairs and their binding affinities in the context of scFvs (in the context of 1+1 Fab-scFv-Fc bsAb format).

[0089] FIG. 24 depicts A) sequence for the common variable light domain used in the humanized mice that were the basis of the PDL1, PDL2, and CD28 common light chain campaign (referred to as 6B1_L1). This variable light domain sequence may be paired with the variable heavy domains as depicted in FIGS. 25, 26, 29, 30, 31, 32, 41, 42, 43, 44, 45, 46, 47, 48, 49, 50, 51, 52, 53, 54, 55, 56, 57, 58, 59, 60, 61, 62, 63, 64, 65, 66, 67, 68, 69, 70, 71, 72, 73, and 74.

[0090] FIG. 25 depicts novel PDL1 binding domain clone 13G1. CDRs are underlined and slashes indicate the border(s) between the variable regions and constant domain. As noted herein and is true for every sequence herein containing CDRs, the exact identification of the CDR locations may be slightly different depending on the numbering used as is shown in Table 2, and thus included herein are not only the CDRs that are underlined but also CDRs included within the VH and VL domains using other numbering systems. Furthermore, as for all the sequences in the Figures, these VH and VL sequences can be used either in a scFv format or in a Fab format.

[0091] FIGS. 26A-26D depicts novel PDL1 binding domain clone 13G7, alternative VH 13G7_H2, alternative VL, 13G7_L2, and illustrative affinity-engineered VH variants (additionally, it should be noted that the CDRs in the affinity-engineered VHs may be grafted onto alternative parental frameworks as described in Example 1B). It should be noted that both 13G7_H1 and 13G7_H2 and affinity-engineered 13G7 VH variants may additionally be paired with 6B1_L1 as depicted in FIG. 24. Additionally, consensus framework regions (FR) and complementarity determining regions (CDRs) for 13G7 VH are depicted. CDRs are underlined and slashes indicate the border(s) between the variable regions and constant domain. As noted herein and is true for every sequence herein containing CDRs, the exact identification of the CDR locations may be slightly different depending on the numbering used as is shown in Table 2, and thus included herein are not only the CDRs that are underlined but also CDRs included within the VH and VL domains using other numbering systems. Furthermore, as for all the sequences in the Figures, these VH and VL sequences can be used either in a scFv format or in a Fab format.

[0092] FIG. 27 depicts dissociation constant (KD), association rate (ka), and dissociation rate (kd) of PDL1 antibodies generated by single-cell technology in mouse genetically engineered with complete human heavy chain variable domain combined with a human common light chain substitution.

[0093] FIG. 28 depicts the variable heavy and variable light chain sequences for additional PDL1 binding domains which find use in the PDL1×CD28 bsAbs and PDL1×PDL2×CD28 triAbs of the invention. As noted herein and is true for every sequence herein containing CDRs, the exact identification of the CDR locations may be slightly different depending on the numbering used as is shown in Table 2, and thus included herein are not only the CDRs that are underlined but also CDRs included within the VH and VL domains using other numbering systems. Furthermore, as for all the sequences in the Figures, these VH and VL sequences can be used either in a scFv format or in a Fab format.

[0094] FIG. 29 depicts novel PDL2 binding domain clone 5C11, as well as alternative VH 5C11_H2. It should be noted that both 5C11_H1 and 5C11_H2 may additionally be paired with 6B1_L1 as depicted in FIG. 24. As noted herein and is true for every sequence herein containing CDRs, the exact identification of the CDR locations may be slightly different depending on the numbering used as is shown in Table 2, and thus included herein are not only the CDRs that are underlined but also CDRs included within the VH and VL domains using other numbering systems. Furthermore, as for all the sequences in the Figures, these VH and VL sequences can be used either in a scFv format or in a Fab format.

[0095] FIG. 30 depicts novel PDL2 binding domain clone 8G2, as well as alternative VH 8G2_H2. It should be noted that both 8G2_H1 and 8G2_H2 may additionally be paired with 6B1_L1 as depicted in FIG. 24. As noted herein and is true for every sequence herein containing CDRs, the exact identification of the CDR locations may be slightly different depending on the numbering used as is shown in Table 2, and thus included herein are not only the CDRs that are underlined but also CDRs included within the VH and VL domains using other numbering systems. Furthermore, as for all the sequences in the Figures, these VH and VL sequences can be used either in a scFv format or in a Fab format.

[0096] FIG. 31 depicts novel PDL2 binding domain clone 8G5, as well as alternative VH 8G5_H3. It should be noted that both 8G5_H1 and 8G5_H3 may additionally be paired with 6B1_L1 as depicted in FIG. 24. As noted herein and is true for every sequence herein containing CDRs, the exact identification of the CDR locations may be slightly different depending on the numbering used as is shown in Table 2, and thus included herein are not only the CDRs that are underlined but also CDRs included within the VH and VL domains using other numbering systems. Furthermore, as for all the sequences in the Figures, these VH and VL sequences can be used either in a scFv format or in a Fab format.

[0097] FIGS. 32A-32D depicts novel PDL2 binding domain clone 16G11, as well as alternative VH 16G11_H2 and 16G11_H3 and illustrative affinity-engineered VH variants (additionally, it should be noted that the CDRs in the affinity-engineered VHs may be grafted onto alternative parental frameworks as described in Example 1B). It should be noted that 16G11_H1, 16G11_H2, and 16G11_H3 and affinity-engineered 16G11 VH variants may additionally be paired with 6B1_L1 as depicted in FIG. 24. Additionally, consensus framework regions (FR) and complementarity determining regions (CDRs) for 16G11 VH are depicted. As noted herein and is true for every sequence herein containing CDRs, the exact identification of the CDR locations may be slightly different depending on the numbering used as is shown in Table 2, and thus included herein are not only the CDRs that are underlined but also CDRs included within the VH and VL domains using other numbering systems. Furthermore, as for all the sequences in the Figures, these VH and VL sequences can be used either in a scFv format or in a Fab format.

[0098] FIG. 33 depicts dissociation constant (KD), association rate (ka), and dissociation rate (kd) of PDL2 antibodies generated by single-cell technology in mouse genetically engineered with complete human heavy chain variable domain combined with a human common light chain substitution.

[0099] FIG. 34 depicts the variable heavy and variable light chain sequences for additional PDL2 binding domains which find use in the PDL2×CD28 bsAbs and PDL1×PDL2×CD28 triAbs of the invention. As noted herein and is true for every sequence herein containing CDRs, the exact identification of the CDR locations may be slightly different depending on the numbering used as is shown in Table 2, and thus included herein are not only the CDRs that are underlined but also CDRs included within the VH and VL domains using other numbering systems. Furthermore, as for all the sequences in the Figures, these VH and VL sequences can be used either in a scFv format or in a Fab format.

[0100] FIG. 35 depicts the variable heavy and variable light chain sequences for 1A7, an exemplary phage-derived CD28 binding domain that is not superagonistic. As noted herein and is true for every sequence herein containing CDRs, the exact identification of the CDR locations may be slightly different depending on the numbering used as is shown in Table 2, and thus included herein are not only the CDRs that are underlined but also CDRs included within the VH and VL domains using other numbering systems. Furthermore, as for all the sequences in the Figures, these VH and VL sequences can be used either in a scFv format or in a Fab format.

[0101] FIG. 36 depicts the sequences for affinity-optimized variable heavy domains from anti-CD28 clone 1A7. It should be noted that the variable heavy domains can be paired with any of the other variable light domains depicted in FIGS. 35 and 37 including SEQ ID NOs: 2456-2524.

[0102] FIG. 37 depicts the sequences for affinity-optimized variable light domain from anti-CD28 clone 1A7. It should be noted that the variable light domains can be paired with any of the other variable light domains depicted in FIGS. 35 and 36 including SEQ ID NOs: 2525-2630.

[0103] FIGS. 38A-38C depicts the sequence for illustrative affinity-optimized 1A7 VH/VL pairs. It should be noted that these pairs may be formatted as Fabs or as scFvs. Additionally, in the scFv format, these pairs may be formatted in the VHVL orientation or the VLVH orientation.

[0104] FIGS. 39A-39B depicts consensus framework regions (FR) and complementarity determining regions (CDRs) (as in Kabat) for anti-CD28 clone 1A7 variable heavy and variable light domain variants.

[0105] FIG. 40 depicts illustrative affinity-engineered 1A7 VH/VL pairs and their binding affinities in the context of scFvs (in the context of 1+1 Fab-scFv-Fc bsAb format).

[0106] FIG. 41 depicts novel CD28 binding domain clone 1B1-5.88488, as well as the sequences for XENP41791, an anti-CD28 mAb based on 1B1-5.88488, and XENP42418, an anti-CD28 mAb utilizing the 1B1-5.88488 VH and the 6B1 common VL. As noted herein and is true for every sequence herein containing CDRs, the exact identification of the CDR locations may be slightly different depending on the numbering used as is shown in Table 2, and thus included herein are not only the CDRs that are underlined but also CDRs included within the VH and VL domains using other numbering systems. Furthermore, as for all the sequences in the Figures, these VH and VL sequences can be used either in a scFv format or in a Fab format.

[0107] FIG. 42 depicts novel CD28 binding domain clone 1B1-4.88488, as well as the sequences for XENP41792, an anti-CD28 mAb based on 1B1-4.88488, and XENP42419, an anti-CD28 mAb utilizing the 1B1-4.88488 VH and the 6B1 common VL. As noted herein and is true for every sequence herein containing CDRs, the exact identification of the CDR locations may be slightly different depending on the numbering used as is shown in Table 2, and thus included herein are not only the CDRs that are underlined but also CDRs included within the VH and VL domains using other numbering systems. Furthermore, as for all the sequences in the Figures, these VH and VL sequences can be used either in a scFv format or in a Fab format.

[0108] FIG. 43 depicts novel CD28 binding domain clone 1D8.88474, as well as the sequences for XENP41834, an anti-CD28 mAb based on 1D8.88474, and XENP42420, an anti-CD28 mAb utilizing the 1D8.88474 VH and the 6B1 common VL. As noted herein and is true for every sequence herein containing CDRs, the exact identification of the CDR locations may be slightly different depending on the numbering used as is shown in Table 2, and thus included herein are not only the CDRs that are underlined but also CDRs included within the VH and VL domains using other numbering systems. Furthermore, as for all the sequences in the Figures, these VH and VL sequences can be used either in a scFv format or in a Fab format.

[0109] FIG. 44 depicts novel CD28 binding domain clone 1G2-2.88474, as well as the sequences for XENP41846, an anti-CD28 mAb based on 1G2-2.88474, and XENP42421, an anti-CD28 mAb utilizing the 1G2-2.88474 VH and the 6B1 common VL. As noted herein and is true for every sequence herein containing CDRs, the exact identification of the CDR locations may be slightly different depending on the numbering used as is shown in Table 2, and thus included herein are not only the CDRs that are underlined but also CDRs included within the VH and VL domains using other numbering systems. Furthermore, as for all the sequences in the Figures, these VH and VL sequences can be used either in a scFv format or in a Fab format.

[0110] FIG. 45 depicts novel CD28 binding domain clone 2G5.88497, as well as the sequences for XENP41864, an anti-CD28 mAb based on 2G5.88497, and XENP42423, an anti-CD28 mAb utilizing the 2G5.88497 VH and the 6B1 common VL. As noted herein and is true for every sequence herein containing CDRs, the exact identification of the CDR locations may be slightly different depending on the numbering used as is shown in Table 2, and thus included herein are not only the CDRs that are underlined but also CDRs included within the VH and VL domains using other numbering systems. Furthermore, as for all the sequences in the Figures, these VH and VL sequences can be used either in a scFv format or in a Fab format.

[0111] FIG. 46 depicts novel CD28 binding domain clone 2A3.88497, as well as the sequences for XENP41882, an anti-CD28 mAb based on 2A3.88497, and XENP42425, an anti-CD28 mAb utilizing the 2A3.88497 VH and the 6B1 common VL. As noted herein and is true for every sequence herein containing CDRs, the exact identification of the CDR locations may be slightly different depending on the numbering used as is shown in Table 2, and thus included herein are not only the CDRs that are underlined but also CDRs included within the VH and VL domains using other numbering systems. Furthermore, as for all the sequences in the Figures, these VH and VL sequences can be used either in a scFv format or in a Fab format.

[0112] FIG. 47 depicts novel CD28 binding domain clone 1D9-3.83967, as well as the sequences for XENP41907, an anti-CD28 mAb based on 1D9-3.83967, and XENP42426, an anti-CD28 mAb utilizing the 1D9-3.83967 VH and the 6B1 common VL. As noted herein and is true for every sequence herein containing CDRs, the exact identification of the CDR locations may be slightly different depending on the numbering used as is shown in Table 2, and thus included herein are not only the CDRs that are underlined but also CDRs included within the VH and VL domains using other numbering systems. Furthermore, as for all the sequences in the Figures, these VH and VL sequences can be used either in a scFv format or in a Fab format.

[0113] FIG. 48 depicts novel CD28 binding domain clone 1C9-1.83967, as well as the sequences for XENP41927, an anti-CD28 mAb based on 1C9-1.83967, and XENP42429, an anti-CD28 mAb utilizing the 1C9-1.83967 VH and the 6B1 common VL. As noted herein and is true for every sequence herein containing CDRs, the exact identification of the CDR locations may be slightly different depending on the numbering used as is shown in Table 2, and thus included herein are not only the CDRs that are underlined but also CDRs included within the VH and VL domains using other numbering systems. Furthermore, as for all the sequences in the Figures, these VH and VL sequences can be used either in a scFv format or in a Fab format.

[0114] FIG. 49 depicts novel CD28 binding domain clone 1D10-4.83967, as well as the sequences for XENP41936, an anti-CD28 mAb based on 1D10-4.83967, and XENP42430, an anti-CD28 mAb utilizing the 1D10-4.83967 VH and the 6B1 common VL. As noted herein and is true for every sequence herein containing CDRs, the exact identification of the CDR locations may be slightly different depending on the numbering used as is shown in Table 2, and thus included herein are not only the CDRs that are underlined but also CDRs included within the VH and VL domains using other numbering systems. Furthermore, as for all the sequences in the Figures, these VH and VL sequences can be used either in a scFv format or in a Fab format.

[0115] FIG. 50 depicts novel CD28 binding domain clone 1A12.83967, as well as the sequences for XENP41957, an anti-CD28 mAb based on 1A12.83967. As noted herein and is true for every sequence herein containing CDRs, the exact identification of the CDR locations may be slightly different depending on the numbering used as is shown in Table 2, and thus included herein are not only the CDRs that are underlined but also CDRs included within the VH and VL domains using other numbering systems. Furthermore, as for all the sequences in the Figures, these VH and VL sequences can be used either in a scFv format or in a Fab format.

[0116] FIG. 51 depicts novel CD28 binding domain clone 1B11.83967, as well as the sequences for XENP41949, an anti-CD28 mAb based on 1B11.83967. As noted herein and is true for every sequence herein containing CDRs, the exact identification of the CDR locations may be slightly different depending on the numbering used as is shown in Table 2, and thus included herein are not only the CDRs that are underlined but also CDRs included within the VH and VL domains using other numbering systems. Furthermore, as for all the sequences in the Figures, these VH and VL sequences can be used either in a scFv format or in a Fab format.

[0117] FIG. 52 depicts novel CD28 binding domain clone 1D10-2.83967, as well as the sequences for XENP41935, an anti-CD28 mAb based on 1D10-2.83967. As noted herein and is true for every sequence herein containing CDRs, the exact identification of the CDR locations may be slightly different depending on the numbering used as is shown in Table 2, and thus included herein are not only the CDRs that are underlined but also CDRs included within the VH and VL domains using other numbering systems. Furthermore, as for all the sequences in the Figures, these VH and VL sequences can be used either in a scFv format or in a Fab format.

[0118] FIG. 53 depicts novel CD28 binding domain clone 1D7.83967, as well as the sequences for XENP41904, an anti-CD28 mAb based on 1D7.83967. As noted herein and is true for every sequence herein containing CDRs, the exact identification of the CDR locations may be slightly different depending on the numbering used as is shown in Table 2, and thus included herein are not only the CDRs that are underlined but also CDRs included within the VH and VL domains using other numbering systems. Furthermore, as for all the sequences in the Figures, these VH and VL sequences can be used either in a scFv format or in a Fab format.

[0119] FIG. 54 depicts novel CD28 binding domain clone 1D3.83967, as well as the sequences for XENP41901, an anti-CD28 mAb based on 1D3.83967. As noted herein and is true for every sequence herein containing CDRs, the exact identification of the CDR locations may be slightly different depending on the numbering used as is shown in Table 2, and thus included herein are not only the CDRs that are underlined but also CDRs included within the VH and VL domains using other numbering systems. Furthermore, as for all the sequences in the Figures, these VH and VL sequences can be used either in a scFv format or in a Fab format.

[0120] FIG. 55 depicts novel CD28 binding domain clone 2B10.88497, as well as the sequences for XENP41891, an anti-CD28 mAb based on 2B10.88497. As noted herein and is true for every sequence herein containing CDRs, the exact identification of the CDR locations may be slightly different depending on the numbering used as is shown in Table 2, and thus included herein are not only the CDRs that are underlined but also CDRs included within the VH and VL domains using other numbering systems. Furthermore, as for all the sequences in the Figures, these VH and VL sequences can be used either in a scFv format or in a Fab format.

[0121] FIG. 56 depicts novel CD28 binding domain clone 2B9.88497, as well as the sequences for XENP41890, an anti-CD28 mAb based on 2B9.88497. As noted herein and is true for every sequence herein containing CDRs, the exact identification of the CDR locations may be slightly different depending on the numbering used as is shown in Table 2, and thus included herein are not only the CDRs that are underlined but also CDRs included within the VH and VL domains using other numbering systems. Furthermore, as for all the sequences in the Figures, these VH and VL sequences can be used either in a scFv format or in a Fab format.

[0122] FIG. 57 depicts novel CD28 binding domain clone 2B8.88497, as well as the sequences for XENP41889, an anti-CD28 mAb based on 2B8.88497. As noted herein and is true for every sequence herein containing CDRs, the exact identification of the CDR locations may be slightly different depending on the numbering used as is shown in Table 2, and thus included herein are not only the CDRs that are underlined but also CDRs included within the VH and VL domains using other numbering systems. Furthermore, as for all the sequences in the Figures, these VH and VL sequences can be used either in a scFv format or in a Fab format.

[0123] FIG. 58 depicts novel CD28 binding domain clone 1G6-1.83967, as well as the sequences for XENP41877, an anti-CD28 mAb based on 1G6-1.83967. As noted herein and is true for every sequence herein containing CDRs, the exact identification of the CDR locations may be slightly different depending on the numbering used as is shown in Table 2, and thus included herein are not only the CDRs that are underlined but also CDRs included within the VH and VL domains using other numbering systems. Furthermore, as for all the sequences in the Figures, these VH and VL sequences can be used either in a scFv format or in a Fab format.

[0124] FIG. 59 depicts novel CD28 binding domain clone 1C7.88474, as well as the sequences for XENP41874, an anti-CD28 mAb based on 1C7.88474. As noted herein and is true for every sequence herein containing CDRs, the exact identification of the CDR locations may be slightly different depending on the numbering used as is shown in Table 2, and thus included herein are not only the CDRs that are underlined but also CDRs included within the VH and VL domains using other numbering systems. Furthermore, as for all the sequences in the Figures, these VH and VL sequences can be used either in a scFv format or in a Fab format.

[0125] FIG. 60 depicts novel CD28 binding domain clone 1A5-2.88474, as well as the sequences for XENP41869, an anti-CD28 mAb based on 1A5-2.88474. As noted herein and is true for every sequence herein containing CDRs, the exact identification of the CDR locations may be slightly different depending on the numbering used as is shown in Table 2, and thus included herein are not only the CDRs that are underlined but also CDRs included within the VH and VL domains using other numbering systems. Furthermore, as for all the sequences in the Figures, these VH and VL sequences can be used either in a scFv format or in a Fab format.

[0126] FIG. 61 depicts novel CD28 binding domain clone 1A2.88474, as well as the sequences for XENP41868, an anti-CD28 mAb based on 1A2.88474. As noted herein and is true for every sequence herein containing CDRs, the exact identification of the CDR locations may be slightly different depending on the numbering used as is shown in Table 2, and thus included herein are not only the CDRs that are underlined but also CDRs included within the VH and VL domains using other numbering systems. Furthermore, as for all the sequences in the Figures, these VH and VL sequences can be used either in a scFv format or in a Fab format.

[0127] FIG. 62 depicts novel CD28 binding domain clone 2F5.88497, as well as the sequences for XENP41860, an anti-CD28 mAb based on 2F5.88497. As noted herein and is true for every sequence herein containing CDRs, the exact identification of the CDR locations may be slightly different depending on the numbering used as is shown in Table 2, and thus included herein are not only the CDRs that are underlined but also CDRs included within the VH and VL domains using other numbering systems. Furthermore, as for all the sequences in the Figures, these VH and VL sequences can be used either in a scFv format or in a Fab format.

[0128] FIG. 63 depicts novel CD28 binding domain clone 2E9.88497, as well as the sequences for XENP41858, an anti-CD28 mAb based on 2E9.88497. As noted herein and is true for every sequence herein containing CDRs, the exact identification of the CDR locations may be slightly different depending on the numbering used as is shown in Table 2, and thus included herein are not only the CDRs that are underlined but also CDRs included within the VH and VL domains using other numbering systems. Furthermore, as for all the sequences in the Figures, these VH and VL sequences can be used either in a scFv format or in a Fab format.

[0129] FIGS. 64A-64C depicts novel CD28 binding domain clone 1A3.88474, as well as the sequences for XENP41849, an anti-CD28 mAb based on 1A3.88474 and illustrative affinity-engineered VH variants. Additionally, consensus framework regions (FR) and complementarity determining regions (CDRs) for 1A3.88474 VH are depicted. As noted herein and is true for every sequence herein containing CDRs, the exact identification of the CDR locations may be slightly different depending on the numbering used as is shown in Table 2, and thus included herein are not only the CDRs that are underlined but also CDRs included within the VH and VL domains using other numbering systems. Furthermore, as for all the sequences in the Figures, these VH and VL sequences can be used either in a scFv format or in a Fab format.

[0130] FIG. 65 depicts novel CD28 binding domain clone 1H11.88474, as well as the sequences for XENP41816, an anti-CD28 mAb based on 1H11.88474. As noted herein and is true for every sequence herein containing CDRs, the exact identification of the CDR locations may be slightly different depending on the numbering used as is shown in Table 2, and thus included herein are not only the CDRs that are underlined but also CDRs included within the VH and VL domains using other numbering systems. Furthermore, as for all the sequences in the Figures, these VH and VL sequences can be used either in a scFv format or in a Fab format.

[0131] FIG. 66 depicts novel CD28 binding domain clone 1G1-1.88474, as well as the sequences for XENP41807, an anti-CD28 mAb based on 1G1-1.88474. As noted herein and is true for every sequence herein containing CDRs, the exact identification of the CDR locations may be slightly different depending on the numbering used as is shown in Table 2, and thus included herein are not only the CDRs that are underlined but also CDRs included within the VH and VL domains using other numbering systems. Furthermore, as for all the sequences in the Figures, these VH and VL sequences can be used either in a scFv format or in a Fab format.

[0132] FIG. 67 depicts novel CD28 binding domain clone 1E6-1.88474, as well as the sequences for XENP41802, an anti-CD28 mAb based on 1E6-1.88474. As noted herein and is true for every sequence herein containing CDRs, the exact identification of the CDR locations may be slightly different depending on the numbering used as is shown in Table 2, and thus included herein are not only the CDRs that are underlined but also CDRs included within the VH and VL domains using other numbering systems. Furthermore, as for all the sequences in the Figures, these VH and VL sequences can be used either in a scFv format or in a Fab format.

[0133] FIG. 68 depicts novel CD28 binding domain clone 1A1-5.88488, as well as the sequences for XENP41797, an anti-CD28 mAb based on 1A1-5.88488. As noted herein and is true for every sequence herein containing CDRs, the exact identification of the CDR locations may be slightly different depending on the numbering used as is shown in Table 2, and thus included herein are not only the CDRs that are underlined but also CDRs included within the VH and VL domains using other numbering systems. Furthermore, as for all the sequences in the Figures, these VH and VL sequences can be used either in a scFv format or in a Fab format.

[0134] FIG. 69 depicts novel CD28 binding domain clone 1E2-5.88488, as well as the sequences for XENP41781, an anti-CD28 mAb based on 1E2-5.88488. As noted herein and is true for every sequence herein containing CDRs, the exact identification of the CDR locations may be slightly different depending on the numbering used as is shown in Table 2, and thus included herein are not only the CDRs that are underlined but also CDRs included within the VH and VL domains using other numbering systems. Furthermore, as for all the sequences in the Figures, these VH and VL sequences can be used either in a scFv format or in a Fab format.

[0135] FIG. 70 depicts novel CD28 binding domain clone 2F6.88497, as well as the sequences for XENP41861, an anti-CD28 mAb based on 2F6.88497, and XENP42422, an anti-CD28 mAb utilizing the 2F6.88497 VH and the 6B1 common VL. As noted herein and is true for every sequence herein containing CDRs, the exact identification of the CDR locations may be slightly different depending on the numbering used as is shown in Table 2, and thus included herein are not only the CDRs that are underlined but also CDRs included within the VH and VL domains using other numbering systems. Furthermore, as for all the sequences in the Figures, these VH and VL sequences can be used either in a scFv format or in a Fab format.

[0136] FIG. 71 depicts novel CD28 binding domain clone 1H2.83967, as well as the sequences for XENP41880, an anti-CD28 mAb based on 1H2.83967, and XENP42424, an anti-CD28 mAb utilizing the 1H2.83967 VH and the 6B1 common VL. As noted herein and is true for every sequence herein containing CDRs, the exact identification of the CDR locations may be slightly different depending on the numbering used as is shown in Table 2, and thus included herein are not only the CDRs that are underlined but also CDRs included within the VH and VL domains using other numbering systems. Furthermore, as for all the sequences in the Figures, these VH and VL sequences can be used either in a scFv format or in a Fab format.

[0137] FIG. 72 depicts novel CD28 binding domain clone 1E4-3.83967, as well as the sequences for XENP41909, an anti-CD28 mAb based on 1E4-3.83967, and XENP42427, an anti-CD28 mAb utilizing the 1E4-3.83967 VH and the 6B1 common VL. As noted herein and is true for every sequence herein containing CDRs, the exact identification of the CDR locations may be slightly different depending on the numbering used as is shown in Table 2, and thus included herein are not only the CDRs that are underlined but also CDRs included within the VH and VL domains using other numbering systems. Furthermore, as for all the sequences in the Figures, these VH and VL sequences can be used either in a scFv format or in a Fab format.

[0138] FIG. 73 depicts novel CD28 binding domain clone 1C2-2.83967, as well as the sequences for XENP41918, an anti-CD28 mAb based on 1C2-2.83967, and XENP42428, an anti-CD28 mAb utilizing the 1C2-2.83967 VH and the 6B1 common VL. As noted herein and is true for every sequence herein containing CDRs, the exact identification of the CDR locations may be slightly different depending on the numbering used as is shown in Table 2, and thus included herein are not only the CDRs that are underlined but also CDRs included within the VH and VL domains using other numbering systems. Furthermore, as for all the sequences in the Figures, these VH and VL sequences can be used either in a scFv format or in a Fab format.

[0139] FIG. 74 depicts novel CD28 binding domain clone 1A11.83967, as well as the sequences for XENP41956, an anti-CD28 mAb based on 1A11.83967, and XENP42431, an anti-CD28 mAb utilizing the 1A11.83967 VH and the 6B1 common VL. As noted herein and is true for every sequence herein containing CDRs, the exact identification of the CDR locations may be slightly different depending on the numbering used as is shown in Table 2, and thus included herein are not only the CDRs that are underlined but also CDRs included within the VH and VL domains using other numbering systems. Furthermore, as for all the sequences in the Figures, these VH and VL sequences can be used either in a scFv format or in a Fab format.

[0140] FIG. 75 depicts maximum BLI-response of binding by CD28 mAbs based on single-cell technology derived binding domains (WT sequences in comparison to VH paired with 6B1_L1) to CD28 antigen. The data show that most of the binding domains retain CD28 binding when paired with 6B1_L1 VL; however, VH from several of the clones (e.g. 1B1-4.88488, 2G5.88497 and 1D10-4.83967) demonstrated diminished CD28 binding when paired with 6B1_L1.

[0141] FIG. 76 depicts maximum BLI-response of binding by CD28 mAbs based on additional single-cell technology derived binding domains to CD28 antigen.

[0142] FIG. 77 depicts binding to Jurkat cells by CD28 mAbs based on single-cell technology derived binding domains.

[0143] FIG. 78 depicts binding to Jurkat cells by CD28 mAbs based on single-cell technology derived binding domains (WT sequences in comparison to VH paired with 6B1_L1 common light chain).

[0144] FIG. 79 depicts induction of IL2 secretion from CD3 stimulated (100 ng/mL OKT3) purified T cells by CD28 mAbs based on single-cell technology derived binding domains.

[0145] FIG. 80 depicts induction of IL2 secretion from CD3 stimulated (100 ng/mL OKT3) purified T cells by CD28 mAbs based on single-cell technology derived binding domains (WT sequences in comparison to VH paired with 6B1_L1 common light chain).

[0146] FIG. 81 depicts the variable heavy and variable light chain sequences for additional CD28 binding domains which find use in the PDL1×CD28 and PDL2×CD28 bsAbs and PDL1×PDL2×CD28 triAbs of the invention. As noted herein and is true for every sequence herein containing CDRs, the exact identification of the CDR locations may be slightly different depending on the numbering used as is shown in Table 2, and thus included herein are not only the CDRs that are underlined but also CDRs included within the VH and VL domains using other numbering systems. Furthermore, as for all the sequences in the Figures, these VH and VL sequences can be used either in a scFv format or in a Fab format.

[0147] FIGS. 82A-82M depicts bispecific formats of the present invention. FIG. 82A depicts the “1+1 Fab-scFv-Fc” format, with a first Fab arm binding a first antigen and a second scFv arm binding second antigen. The 1+1 Fab-scFv-Fc format comprises a first monomer comprising a first heavy chain variable region (VH1) covalently attached to the N-terminus of a first heterodimeric Fc backbone (optionally via a linker), a second monomer comprising a single-chain Fv covalently attached to the N-terminus of a second corresponding heterodimeric Fc backbone (optionally via a linker), and a third monomer comprising a light chain variable region covalently to a light chain constant domain, wherein the light chain variable region is complementary to the VH1. FIG. 82B depicts the “2+1 Fab2-scFv-Fc” format, with a first Fab arm and a second Fab-scFv arm, wherein the Fab binds a first antigen and the scFv binds second antigen. The 2+1 Fab2-scFv-Fc format comprises a first monomer comprising a first heavy chain variable region (VH1) covalently attached to the N-terminus of a first heterodimeric Fc backbone (optionally via a linker), a second monomer comprising the VH1 covalently attached (optionally via a linker) to a single-chain Fv covalently attached (optionally via a linker) to the N-terminus of a second corresponding heterodimeric Fc backbone, and a third monomer comprising a light chain variable region covalently to a light chain constant domain, wherein the light chain variable region is complementary to the VH1. FIG. 82C depicts the “1+1 Common Light Chain” or “1+1 CLC” format, with a first Fc comprising a first Fab arm binding a first antigen and a second Fc comprising a second Fab arm binding second antigen. The 1+1 CLC format comprises a first monomer comprising VH1-CH1-hinge-CH2-CH3, a second monomer comprising VH2-CH1-hinge-CH2-CH3, and a third monomer comprising VL-CL. The VL pairs with the VH1 to form a binding domain with a first antigen binding specificity; and the VL pairs with the VH2 to form a binding domain with a second antigen binding specificity. FIG. 82D depicts the “2+1 Common Light Chain” or “2+1 CLC” format, with a first Fc comprising 2 Fab arms each binding a first antigen and a second Fc comprising 1 Fab arm binding a second antigen. The 2+1 CLC format comprises a first monomer comprising VH1-CH1-hinge-VH1-CH1-hinge-CH2-CH3, a second monomer comprising VH2-CH1-hinge-CH2-CH3, and a third monomer comprising VL-CL. The VL pairs with the first and second VH1 to form binding domains with a first antigen binding specificity; and the VL pairs with the VH2 to form a binding domain with a second antigen binding specificity. FIG. 82E depicts the “2+1 mAb-scFv” format, with a first Fc comprising an N-terminal Fab arm binding a first antigen and a second Fc comprising an N-terminal Fab arm binding the first antigen and a C-terminal scFv binding a second antigen. The 2+1 mAb-scFv format comprises a first monomer comprising VH1-CH1-hinge-CH2-CH3, a second monomer comprising VH1-CH1-hinge-CH2-CH3-scFv, and a third monomer comprising VL-CL. The VL pairs with the first and second VH1 to form binding domains with binding specificity for the first antigen. Additional bispecific formats include F) dual scFv, G) one-arm scFv-mAb, H) scFv-mAb, I) bispecific mAb, J) one-arm central-scFv, K) mAb-Fv, L) central-Fv, and M) trident.

[0148] FIGS. 83A-83D depicts trispecific formats of the present invention. FIG. 83A depicts the “1+1+1 stackFab2-scFv-Fc” format which comprises a first monomer comprising, from N-terminal to C-terminal VH1-CH1-linker-VH2-CH1-hinge-CH2-CH3 wherein CH2-CH3 is a first heterodimeric Fc domain; a second monomer comprising, from N-terminal to C-terminal scFv-linker-CH2-CH3 wherein CH2-CH3 is a second heterodimeric Fc domain complementary to the first heterodimeric Fc domain and wherein the scFv has a first antigen specificity; and a third monomer that is a common light chain comprising, from N-terminal to C-terminal VL-CL wherein the VL pairs with VH1 to form an antigen binding domain having a second antigen specificity and with VH2 to form an antigen binding domain having a third antigen specificity. FIG. 83D depicts the “1+1+1 Fab-(Fab-scFv)-Fc format) which comprises a first monomer that is a heavy chain comprising, from N-terminal to C-terminal VH1-CH1-hinge-CH2-CH3 wherein CH2-CH3 is a first heterodimeric Fc domain; a second monomer comprising, from N-terminal to C-terminal VH2-CH1-linker-scFv-linker-CH2-CH3 wherein CH2-CH3 is a second heterodimeric Fc domain complementary to the first heterodimeric Fc domain and wherein the scFv has a first antigen specificity; and a third monomer that is a common light chain comprising, from N-terminal to C-terminal VL-CL wherein the VL pairs with VH1 to form an antigen binding domain having a second antigen specificity and with VH2 to form an antigen binding domain having a third antigen specificity. FIG. 83C depicts the “1+1+1 mAb-scFv” format which comprises a first monomer that is a heavy chain comprising, from N-terminal to C-terminal VH1-CH1-hinge-CH2-CH3 wherein CH2-CH3 is a first heterodimeric Fc domain; a second monomer comprising, from N-terminal to C-terminal VH2-CH1-hinge-CH2-CH3-linker-scFv wherein CH2-CH3 is a second heterodimeric Fc domain complementary to the first heterodimeric Fc domain and wherein the scFv has a first antigen specificity; and a third monomer that is a common light chain comprising, from N-terminal to C-terminal VL-CL wherein the VL pairs with VH1 to form an antigen binding domain having a second antigen specificity and with VH2 to form an antigen binding domain having a third antigen specificity. FIG. 83D depicts the “1+1+1 stackFab2-Fab-Fc” format which comprises a first monomer that is a heavy chain comprising, from N-terminal to C-terminal VH1-CH1-hinge-CH2-CH3 wherein CH2-CH3 is a first heterodimeric Fe domain; a second monomer comprising, from N-terminal to C-terminal VH2-CH1-linker-VH3-CH1-hinge-CH2-CH3 wherein CH2-CH3 is a second heterodimeric Fc domain complementary to the first heterodimeric Fc domain; and a third monomer that is a common light chain comprising, from N-terminal to C-terminal VL-CL wherein the VL pairs with VH1 to form an antigen binding domain having a first antigen specificity, with VH2 to form an antigen binding domain having a second antigen specificity, and with VH3 to form an antigen binding domain having a third antigen specificity.

[0149] FIGS. 84A-84T depict the sequences for illustrative PDL1×CD28 bsAbs in the 1+1 Fab-scFv-Fc format. CDRs are underlined and slashes indicate the border(s) between the variable regions, Fc regions, and constant domains. It should be noted that the αPD-L1×αCD28 bsAbs can utilize variable region, Fc region, and constant domain sequences that are 90, 95, 98 and 99% identical (as defined herein), and/or contain from 1, 2, 3, 4, 5, 6, 7, 8, 9 or 10 amino acid substitutions. In addition, each sequence outlined herein can include or exclude the M428L/N434S variants in one or preferably both Fc domains, which including M428L/N434S results in longer half-life in serum.

[0150] FIG. 85 depicts the sequences for illustrative αPD-L1×αCD28 bsAbs in the 2+1 Fab2-scFv-Fc format. CDRs are underlined and slashes indicate the border(s) between the variable regions, Fc regions, and constant domains. The scFv domain has orientation (N- to C-terminus) of VH-scFv linker-VL, although this can be reversed. It should be noted that the scFv domain sequences includes as the scFv linker between the variable heavy and variable light region the sequence GKPGSGKPGSGKPGSGKPGS (SEQ ID NO:XX); however, this linker can be replaced with any of the scFv linkers in FIG. 6. It should also be noted that the Chain 2 sequences include as the domain linker between the C-terminus of the scFv and the N-terminus of the CH2 domain the sequence GGGGSGGGGSKTHTCPPCP (SEQ ID NO:XX), which is a “flex half hinge” domain linker; however, this linker can be replaced with any of the “useful domain linkers” of FIG. 7. It should be noted that the αPD-L1×αCD28 bsAbs can utilize variable region, Fc region, and constant domain sequences that are 90, 95, 98 and 99% identical (as defined herein), and/or contain from 1, 2, 3, 4, 5, 6, 7, 8, 9 or 10 amino acid substitutions. In addition, each sequence outlined herein can include or exclude the M428L/N434S variants in one or preferably both Fc domains, which results in longer half-life in serum.

[0151] FIG. 86 depicts the sequences for illustrative PDL1×CD28 bsAbs in the 2+1 mAb-scFv format. CDRs are underlined and slashes indicate the border(s) between the variable regions, linkers, Fc regions, and constant domains. The scFv domain has orientation (N- to C-terminus) of V_{H}-scFv linker-V_{L}, although this can be reversed. It should be noted that the Chain 2 sequences include as a domain linker the sequence GKPGSGKPGSGKPGSGKPGS (SEQ ID NO:XX); however, this linker can be replaced with any domain linker include any of the “useful domain linkers” of FIG. 6. It should be noted that the αPDL1×αCD28 bsAbs can utilize variable region, Fc region, and constant domain sequences that are 90, 95, 98 and 99% identical (as defined herein), and/or contain from 1, 2, 3, 4, 5, 6, 7, 8, 9 or 10 amino acid substitutions. In addition, each sequence outlined herein can include or exclude the M428L/N434S variants in one or preferably both Fc domains, which results in longer half-life in serum.

[0152] FIGS. 87A-87B depict the sequences for illustrative PDL2×CD28 bsAbs in the 1+1 Fab-scFv-Fc format. CDRs are underlined and slashes indicate the border(s) between the variable regions, Fc regions, and constant domains. It should be noted that the PDL2×CD28 bsAbs can utilize variable region, Fc region, and constant domain sequences that are 90, 95, 98 and 99% identical (as defined herein), and/or contain from 1, 2, 3, 4, 5, 6, 7, 8, 9 or 10 amino acid substitutions. In addition, each sequence outlined herein can include or exclude the M428L/N434S variants in one or preferably both Fc domains, which including M428L/N434S results in longer half-life in serum.

[0153] FIGS. 88A-88M depict the sequences for illustrative PDL1×PDL2×CD28 triAbs in the 1+1+1 stackFab2-scFv-Fc format. CDRs are underlined and slashes indicate the border(s) between the variable regions and other domains (e.g. constant domains). It should be noted that the PDL1×PDL2×CD28 triAbs can utilize variable region, Fc region, and constant domain sequences that are 90, 95, 98 and 99% identical (as defined herein), and/or contain from 1, 2, 3, 4, 5, 6, 7, 8, 9 or 10 amino acid substitutions. In addition, each sequence outlined herein can include or exclude the M428L/N434S variants in one or preferably both Fc domains, which including M428L/N434S results in longer half-life in serum.

[0154] FIGS. 89A-89B depict the sequences for illustrative PDL1×PDL2×CD28 triAbs in the 1+1+1 Fab-(Fab-scFv)-Fc format. CDRs are underlined and slashes indicate the border(s) between the variable regions and other domains (e.g. constant domains). It should be noted that the PDL1×PDL2×CD28 triAbs can utilize variable region, Fc region, and constant domain sequences that are 90, 95, 98 and 99% identical (as defined herein), and/or contain from 1, 2, 3, 4, 5, 6, 7, 8, 9 or 10 amino acid substitutions. In addition, each sequence outlined herein can include or exclude the M428L/N434S variants in one or preferably both Fc domains, which including M428L/N434S results in longer half-life in serum.

[0155] FIG. 90 depict the sequences for illustrative PDL1×PDL2×CD28 triAbs in the 1+1+1 mAb-scFv format. CDRs are underlined and slashes indicate the border(s) between the variable regions and other domains (e.g. constant domains). It should be noted that the PDL1×PDL2×CD28 triAbs can utilize variable region, Fc region, and constant domain sequences that are 90, 95, 98 and 99% identical (as defined herein), and/or contain from 1, 2, 3, 4, 5, 6, 7, 8, 9 or 10 amino acid substitutions. In addition, each sequence outlined herein can include or exclude the M428L/N434S variants in one or preferably both Fc domains, which including M428L/N434S results in longer half-life in serum.

[0156] FIGS. 91A-91P depict the sequences for illustrative PDL1×PDL2×CD28 triAbs in the 1+1+1 stackFab2-Fab-Fc format. CDRs are underlined and slashes indicate the border(s) between the variable regions and other domains (e.g. constant domains). It should be noted that the PDL1×PDL2×CD28 triAbs can utilize variable region, Fc region, and constant domain sequences that are 90, 95, 98 and 99% identical (as defined herein), and/or contain from 1, 2, 3, 4, 5, 6, 7, 8, 9 or 10 amino acid substitutions. In addition, each sequence outlined herein can include or exclude the M428L/N434S variants in one or preferably both Fc domains, which including M428L/N434S results in longer half-life in serum.

[0157] FIG. 92 depicts A) classic T cell/APC interaction and B) replication of the classic T cell/APC interaction by combining CD3 bispecific antibodies with CD28 bispecific antibodies. In classic T cell/APC interaction, there is a first signal provided by TCR reactivity with peptide-MHC (Signal 1) and a second signal provided by CD28 crosslinking by CD80/CD86 being expressed on APCs (Signal 2) which together fully activate T cells. In contrast in treatment with CD3 bispecifics, only the first signal is provided. The CD28 signal may be provided by a CD28 bispecific with the idea to promote activation and proliferation through CD28 costimulation.

[0158] FIG. 93 depicts the introduction of CD28 signaling by a CD28 bispecific antibody and mitigation of any checkpoint mediated repression of the added CD28 signal by checkpoint blockade (e.g. PD-1 blockade).

[0159] FIG. 94 depicts that PDL1×CD28 bispecific antibodies provide Signal 2 while advantageously further enabling blockade of PDL1:PD1 interaction. Although not depicted, PDL2×CD28 bispecific antibodies may similarly provide Signal 2 while advantageously further enabling blockade of PDL2:PD1 interaction.

[0160] FIG. 95 depicts the sequences for XENP24118, a PDL1 mAb based on avelumab and IgG1 backbone with E233P/L234V/L235A/G236del/S267K ablation variant. CDRs are underlined and slashes indicated border(s) between the variable region and constant domain.

[0161] FIG. 96 depicts expansion of CMV+ T cells following incubation of NLV-loaded MDA-MB-231 cancer cells with CD3+ T cells purified from a CMV+ donor and either αPD-L1 antibody XENP24118 or αPD-L1×αCD28 bsAb XENP34963. αPD-L1×αCD28 bsAb XENP34963 significantly enhanced T cell expansion in comparison to PD-L1 blockade alone.

[0162] FIG. 97 depicts induction of A) TL-2 secretion, B) IFNγ secretion, and C) CD3+ T cell expansion by 1 μg/ml αB7H3×αCD3 bsAb in combination with αPD-L1 mAb XENP24118 or in combination with αPD-L1×αCD28 bsAb XENP34963. αPD-L1×αCD28 bsAb enhances activity of a CD3 bsAb T cell engager.

[0163] FIG. 98 depicts cell kill over time following incubation of LNCaP cancer cells (PSMA+) with CD3+ T cells at a 1:1 effector:target ratio and illustrative CD3 bispecific (αPSMA×αCD3 XENP32220) alone or in combination with XENP36233. The data show that XENP32220 enhanced cell kill in comparison to incubation of cancer and T cells alone; however, addition of αPD-L1×αCD28 overcomes cancer cell resistance to the CD3 bispecific and further enhances cell kill.

[0164] FIG. 99 depicts group median change in tumor volume (as determined by caliper measurement; baseline corrected) A) over time (in days after first dose) and B) Day 20 (after first dose) in MC38 (engineered to stably expressing human PD-L1) and huPBMC-engrafted human CD28 knock-in mice dosed with 5 mg/kg αPD-L1 mAb XENP24118, 8.3 mg/kg αPD-L1×αCD28 bsAb XENP34963, 6 mg/kg αPD-L1×αCD28 XENP34961, or PBS control.

[0165] FIG. 100 depicts induction of A) IL-2 and B) IFNγ release by anti-PDL1 clone 2G4 (XENP25859), a partial blocking anti-PDL1 (XENP25853), a non-blocking anti-PDL1 (XENP25858), and XENP24118 (a benchmark anti-PDL1 mAb based on avelumab). The data show that the partial blocking and non-blocking anti-PDL1 clones induced less cytokine release in comparison to anti-PDL1 clone 2G4.

[0166] FIG. 101 depicts blockade of PD1:PDL1 interaction during T cell:cancer cell interaction (as modeled by Jurkat-PD1 cells incubated with CHO-PDL1-CD80-αCD3 and CHO-PDL1-αCD3 cells) by αPDL1×αCD28 bsAbs having anti-PDL1 clone 2G4 (XENP36233), a partial blocking anti-PDL1 (XENP36232), a non-blocking anti-PDL1 (XENP26783), and XENP34963 (a benchmark bsAb with an anti-PDL1 arm based on avelumab). The data show that bsAbs comprising partial blocking and non-blocking anti-PDL1 clones induced less activity in comparison to bsAb comprising anti-PDL1 clone 2G4.

[0167] FIG. 102 depicts binding of αPDL1×αCD28 (XENP36233) to parental PDL1^{null} MC38 or MC38 cells transfected to express PDL1 with low or medium high antigen densities.

[0168] FIG. 103 depicts induction of IL-2 release by αPDL1×αCD28 (XENP36233) in the presence of parental PDL1^{null} HEK293T cells or HEK293T transfected to express PDL1 with medium or high antigen densities.

[0169] FIG. 104 depicts induction of cell kill by αPSMA×αCD3 alone or in combination with αPDL1×αCD28 XENP36233 in the presence of CD3+ T cells and PDL1^{null} 22Rv1 cell line at A) 10:1 E:T ratio and B) 1:1 E:T ratio. The data show that αPDL1×αCD28 bsAbs do not synergize with CD3 bsAbs on PDL1 negative cell lines such as 22Rv1.

[0170] FIG. 105 depicts serum concentration of XENP36764 over time in cynomolgus monkeys. The αPDL1×αCD28 bsAb exhibited favorable pharmacokinetics.

[0171] FIG. 106 depicts diagram of assumptions used in a mechanism-based PK/PD computer model.

[0172] FIG. 107 depicts predictions from the mechanism-based modeling suggesting A) linear PK at dose levels consistent with typical checkpoint inhibitor regimens, B) trimer formation in the tumor indicating costimulation, and C) consistent blockade of PDL1.

[0173] FIG. 108 depicts induction of IL-2 release by αPDL1×αCD28 bsAbs having affinity-engineered CD28 binding domains in the presence of αB7H3×αCD3 bsAb, CD3+ T cells, and A) MDA-MB-231 or B) DU145-NLR cells. The data show that increasing CD28 affinity leads to more potent and efficacious TL-2 secretion by αPDL1×αCD28 bsAbs.

[0174] FIG. 109 depicts induction of cell kill by αPDL1×αCD28 bsAbs having affinity-engineered CD28 binding domains in the presence of αB7H3×αCD3 bsAb, CD3+ T cells, and PDL1^{low} LnCAP cancer cells. The data show that increasing the affinity of CD28 increases targeting of PDL1^{low} cancer cells at low E:T of 1:1.

[0175] FIG. 110 depicts induction of cell kill by αPDL1×αCD28 bsAbs having affinity-engineered CD28 binding domains in the presence of αB7H3×αCD3 bsAb, CD3+ T cells, and PDL1^{med} DU145 cells. The data show that increasing the affinity of CD28 increases targeting of PDL1^{med} cancer cells at even lower E:T of 0.1:1.

[0176] FIG. 111 depicts change in tumor volume (as determined by caliper measurements; baseline corrected) in individual mouse over time and D) on Day 28 in hPDL1-MC38-engrafted hCD28 knock-in mice dosed with A) PBS control, B) monovalent αPDL1 mAb XENP36627, and C) XENP37261 having enhanced CD28 binding affinity.

[0177] FIG. 112 depicts induction of IL-2 release by αPDL1×αCD28 bsAbs having affinity-engineered PDL1 binding domains in the presence of αB7H3×αCD3 bsAb, CD3+ T cells, and DU145-NLR cells. The data show that increasing PDL1 affinity promotes TL-2 secretion.

[0178] FIG. 113 depicts induction of A) IL2 and B) IFNγ release by αPDL1 mAb XENP24118 and αPDL1×αCD28 bsAb XENP38514 having enhanced PDL1 binding in a DC:T cell MLR. The data show that αPDL1×αCD28 enhanced T cell/APC interaction.

[0179] FIG. 114 depicts PD1:PDL1 blockade (binding of PDL1-mFc fusion to PD1-transfected HEK293T cells) by αPDL1×αCD28 bsAbs having affinity-engineered PDL1 binding domains. The data show the αPDL1×αCD28 bsAbs can block interaction between PD1 and PDL1.

[0180] FIG. 115 depicts induction of IL-2 release by αPDL1×αCD28 bsAbs having affinity-engineered CD28 binding domains and affinity-engineered PDL1 binding domains in the presence of SEB-stimulated PBMCs. The data show that increasing PDL1 affinity promotes TL-2 secretion.

[0181] FIG. 116 depicts induction of IL-2 release by αPDL1×αCD28 bsAbs having affinity-engineered CD28 binding domains and affinity-engineered PDL1 binding domains in the presence of CD3+ enriched T cells, MDA-MB0231 transfected to express αCD3 scFv (to act as Signal 1), and 1 μg/mL of an illustrative B7H3×CD3 bsAb. The data show that XENP40409 (non-Xtend analog of XENP40706) having 2G4_H1.12_L1.14 induced IL2 production most potently.

[0182] FIG. 117 depicts CD28 receptor occupancy on cynomolgus T cells (as indicated by decrease in binding by secondary CD28 mAb) after dosing with A) XENP36803 (1× dose, 4× dose, and 10× dose) or B) XENP36764 (4× dose, 10× dose, and 20× dose). The data show CD28 receptor occupancy up to day 14 on T cells.

[0183] FIG. 118 depicts PDL1 receptor occupancy on cynomolgus T cells (decrease in free receptor as indicated by decrease in binding by one-arm PDL1 mAb based on 2G4) after dosing with A) XENP36803 (1× dose, 4× dose, and 10× dose) or B) XENP36764 (4× dose, 10× dose, and 20× dose).

[0184] FIGS. 119A-119B depicts proliferation of cynomolgus T cells (as indicated by increased Ki67 expression) after dosing with A) XENP36803 (1× dose, 4× dose, and 10× dose) or B) XENP36764 (4× dose, 10× dose, and 20× dose). Notably, the PDL1×CD28 bsAbs selectively induce proliferation of effector CD4+ and CD8+ T cells (i.e. CD45RA−).

[0185] FIG. 120 depicts induction of A) IL-2 secretion and B) IFNγ secretion from T cells by 1 μg/ml illustrative B7H3×CD3 bsAb in combination with XENP37261, XENP40409, and additional PDL1×CD28 bsAbs utilizing additional PDL1 binding domains obtained from a common light chain campaign in the presence of MDA-MB-231 PDL1⁺PDL2⁺ cancer cells (1:1 E:T). XENP42047 and XENP42048 respectively utilizing 13G1 and 13G7 PDL1 CLC binding domains demonstrated similar potency and efficacy as XENP37261, while additional bsAbs utilizing other PDL1 CLC binding domains were less potent and/or efficacious.

[0186] FIG. 121 depicts induction of A) IL-2 secretion and B) IFNγ secretion from T cells by 1 μg/ml illustrative B7H3×CD3 bsAb in combination with XENP37261, XENP40409, and PDL2×CD28 bsAbs utilizing PDL2 binding domains obtained from a common light chain campaign in the presence of MDA-MB-231 PDL1⁺PDL2⁺ cancer cells (1:1 E:T). Most of the PDL2×CD28 bsAbs (XENP42051, XENP42052, XENP42053, and XENP42054 respectively utilizing 5C11, 8G2, 8G5, and 16G11 PDL2 CLC binding domains) but not all (i.e. XENP42050 using another high affinity PDL2 CLC binding domain) were equally or more potent and/or efficacious than the PDL1×CD28 bsAbs in inducing cytokine release

[0187] FIG. 122 depicts scenarios wherein tumor cells have different expression levels of PDL1 and PDL2 and relative binding capacities of a PDL1×CD28 bsAb, a combination of PDL1×CD28 and PDL2×CD28 bsAbs, and a PDL1×PDL2×CD28 triAb (in the 1+1+1 Fab-Fab-scFv format having PDL1 and PDL2 CLC binding domain and a CD28 binding domain) and illustrates that the triAb targets PDL1⁻PDL2⁺ tumors (assuming saturation, 100% avidity when possible (no switchover to monovalent interactions that may occur at high concentration)).

[0188] FIG. 123 depicts induction of IL-2 secretion by T cells by 1 μg/ml illustrative murine B7H3×CD3 bsAb in combination with XENP40409, PDL1×CD28 bsAbs utilizing CLC PDL1 binding domains (XENP42047 and XENP42049), PDL2×CD28 bsAbs utilizing CLC PDL2 binding domains (XENP42051, XENP42052, XENP42053, and XENP42054), PDL1×PDL2×CD28 triAbs in the 1+1+1 stackFab2-scFv-Fc format having PDL2 on the bottom (XENP42324, XENP42325, XENP42326, XENP42327, XENP42328, XENP42329, XENP42330, and XENP42331), PDL1×PDL2×CD28 triAbs in the 1+1+1 stackFab2-scFv-Fc format having PDL1 on the bottom (XENP42332, XENP42333, XENP42334, XENP42335, XENP42336, XENP42337, XENP42338, and XENP42339), and PDL1×PDL2×CD28 triAbs in the 1+1+1 mAb-scFv format (XENP42340, XENP42341, XENP42342, XENP42343, XENP42344, XENP42345, XENP42346, and XENP42347) in the presence of CHO-PDL1 cells (1:1 E:T).

[0189] FIG. 124 depicts induction of IL-2 secretion by T cells by 1 μg/ml illustrative murine B7H3×CD3 bsAb in combination with XENP40409, PDL1×CD28 bsAbs utilizing CLC PDL1 binding domains (XENP42047 and XENP42049), PDL2×CD28 bsAbs utilizing CLC PDL2 binding domains (XENP42051, XENP42052, XENP42053, and XENP42054), PDL1×PDL2×CD28 triAbs in the 1+1+1 stackFab2-scFv-Fc format having PDL2 on the bottom (XENP42324, XENP42325, XENP42326, XENP42327, XENP42328, XENP42329, XENP42330, and XENP42331), PDL1×PDL2×CD28 triAbs in the 1+1+1 stackFab2-scFv-Fc format having PDL1 on the bottom (XENP42332, XENP42333, XENP42334, XENP42335, XENP42336, XENP42337, XENP42338, and XENP42339), and PDL1×PDL2×CD28 triAbs in the 1+1+1 mAb-scFv format (XENP42340, XENP42341, XENP42342, XENP42343, XENP42344, XENP42345, XENP42346, and XENP42347) in the presence of CHO-PDL2 cells (1:1 E:T).

[0190] FIG. 125 depicts relative PDL1, PDL2, and B7H3 expression levels on LCLC-103H, SNU-423, and NCI-H460 cancer cells.

[0191] FIG. 126 depicts induction of IL-2 secretion from T cells by 1 μg/ml illustrative B7H3×CD3 bsAb in combination with XENP40409, PDL1×CD28 bsAbs utilizing PDL1 binding domains obtained from common light chain campaign (XENP42047 and XENP42049) and PDL2×CD28 bsAbs utilizing PDL2 binding domains obtained from common light chain campaign (XENP42051, XENP42052, XENP42053, and XENP42054) in the presence of A) LCLC-103H, B) SNU-423, and C) NCI-H460 cancer cells (1:1 E:T). Each of the bsAbs were active on LCLC-103H and SNU-423 with XPL1-13G1 as the most potent PDL1 binding domain (as in XENP42047) and 8G2 as the most potent PDL2 binding domain (as in XENP42052).

[0192] FIGS. 127A-127C depicts induction of IL-2 secretion by T cells by 1 μg/ml illustrative B7H3×CD3 bsAb in combination PDL1×PDL2×CD28 triAbs in the 1+1+1 stackFab2-scFv-Fc format having PDL2 on the bottom (XENP42324, XENP42325, XENP42326, XENP42327, XENP42328, XENP42329, XENP42330, and XENP42331) and PDL1×PDL2×CD28 triAbs in the 1+1+1 stackFab2-scFv-Fc format having PDL1 on the bottom (XENP42332, XENP42333, XENP42334, XENP42335, XENP42336, XENP42337, XENP42338, and XENP42339) in the presence of A) LCLC-103H, B) SNU-423, and C) NCI-H460 cancer cells (1:1 E:T). D) depicts the legend.

[0193] FIG. 128 depicts PD-1 blockade by PDL1×CD28 and PDL2×CD28 bsAbs based on various PDL1 and PDL2 binding domains on CHO-PDL1 cells.

[0194] FIG. 129 depicts PD-1 blockade by PDL1×CD28 and PDL2×CD28 bsAbs based on various PDL1 and PDL2 binding domains on CHO-PDL2 cells.

[0195] FIGS. 130A-130C depicts induction of IL-2 secretion by T cells by illustrative murine B7H3×CD3 bsAb in combination with A) XENP42049 PDL1×CD28, B) XENP42054 PDL2×CD28, and C) XENP43461 PDL1×PDL2×CD28 in the presence of LCLC103H-NLR cell line and PDL1 blockade or PDL2 blockade.

[0196] FIG. 131 depicts control antibodies utilizing an RSV binding domain.

[0197] FIG. 132 depicts PDL1 expression on PC3 cells cocultured with T cells after treatment with illustrative B7H3×CD3 bsAb alone or in combination with IFNγ neutralizing mAb. CD3 bsAb induces PDL1 and PDL2 expression by promoting IFNγ release.

[0198] FIGS. 133A-133C depicts IFNγ secretion by T cells cocultured with PC3 cells and then treated with the indicated antibodies (illustrative B7H3×CD3 bsAb alone or in combination with XENP40409) for A) 1 day, B) 2 days, and c) 5 days. CD3 bsAb synergizes with PDL1×CD28 over time as PDL1 expression increases.

[0199] FIG. 134 depicts induction of IFNγ release (5 days post-treatment) in mixed lymphocyte reactions (n=14) following incubation with PBS, XENP43456 (PDL1×PDL2×RSV), or anti-PD1 mAb. PDL1 and PDL2 blockade is functionally equivalent to PD1 blockade.

[0200] FIG. 135 depicts IFNγ release (1 day post-treatment) by PBMC treated with indicated air-dried αCD28 bivalent antibodies (TGN1412 or 1A7-derived). 1A7-derived anti-CD28 epitope lacks superagonistic properties.

[0201] FIGS. 136A-136B depicts induction of IL2 release by T cells cocultured with A) PDL1^{high} MDA-MB-231 cancer cells (1:1 effector:target ratio; ˜130,000 PDL1 antigens) and B) PDL1^{low} LNCaP (10:1 effector:target ratio; ˜13,000 PDL1 antigens) and treated with indicated concentrations of indicated PDL1×PDL2×CD28 triAb in combination with illustrative B7H3×CD3 bsAb. PDL1×PDL2×CD28 triAb enhanced IL-2 release on high PDL1 and low PDL1 cancer cells.

[0202] FIGS. 137A-137B depicts induction of redirected T cell cytotoxicity (RTCC; as determined by luminescence 5 days following treatment) by T cells cocultured with A) PDL1^{high} MDA-MB-231 cancer cells (1:50 effector:target ratio; ˜130,000 PDL1 antigens) and B) PDL1^{low} LNCaP (10:1 effector:target ratio; ˜13,000 PDL1 antigens) and treated with indicated concentrations of illustrative B7H3×CD3 bsAb alone or in combination with 1 μg/ml indicated PDL1×PDL2×CD28 triAb. PDL1×PDL2×CD28 triAb enhances redirected T cell cytotoxicity at low effector to target ratios as well as on low PDL1 cancer cells.

[0203] FIGS. 138A-138B depicts induction of IL2 release (24 hour post-treatment) by T cells from A) a first and B) a second CMV+ PBMC donor cocultured with A431-132M-null cells or A431-432M-null cells stably expression a fusion of HLA-A2, ß2M and NLV-peptide and treated with PDL1×PDL2×CD28, PDL1×PDL2×RSV, or RSV×CD28.

[0204] FIGS. 139A and 139B depict sequences for XENP43734 and XENP43735 which are respectively mouse surrogate PDL1×PDL2×CD28 and PDL1×PDL2×RSV triAbs. It should be noted that, XENP43735 can be considered as a mouse surrogate for XENP43461 (without Xtend).

[0205] FIGS. 140A-140D depict change in tumor volume (as determined by caliper measurements) in individual mouse over time in hPDL1(high)-MC38-engrafted hCD28 knock-in mice dosed with A) PBS control, B) anti-mouse PD1 mAb, and C) XENP43735 (mouse surrogate PDL1×PDL2×RSV triAb control), and D) XENP43734 (mouse surrogate PDL1×PDL2×CD28 triAb analogous to XENP43461 (without Xtend)). Arrows indicate days of dosing.

[0206] FIG. 141 depicts blockade of PD1:PDL1 and PD1:PDL2 on Jurkat-PD1 cells incubated with A431-αCD3 by bivalent PD-1 mAb or XENP43456 PDL1×PDL2×RSV triAb.

[0207] FIGS. 142A-142E depicts change in tumor volume (as determined by caliper measurements) in individual mouse over time in MDA-MB-231 and huPBMC-engrafted NSG-DKO mice dosed with A) PBS control, B) illustrative B7H3×CD3 bsAb (0.5 mg/kg), C) PDL1×PDL2×CD28 XENP44676 in combination with B7H3×CD3 bsAb (respectively 5 mg/kg and 0.5 mg/kg), D) control PDL1×PDL2×RSV XENP44796 in combination with B7H3×CD3 bsAb (respectively 5 mg/kg and 0.5 mg/kg), or E) control RSV×RSV×CD28 XENP44797 in combination with B7H3×CD3 bsAb (respectively 5 mg/kg and 0.5 mg/kg).

[0208] FIG. 143 depicts tumor volumes (as determined by caliper measurements) in individual MDA-MB-231 and huPBMC-engrafted NSG-DKO mice on Day 39 after dosing with A) PBS control, B) illustrative B7H3×CD3 bsAb (0.5 mg/kg), C) PDL1×PDL2×CD28 XENP44676 in combination with B7H3×CD3 bsAb (respectively 5 mg/kg and 0.5 mg/kg), D) control PDL1×PDL2×RSV XENP44796 in combination with B7H3×CD3 bsAb (respectively 5 mg/kg and 0.5 mg/kg), or E) control RSV×RSV×CD28 XENP44797 in combination with B7H3×CD3 bsAb (respectively 5 mg/kg and 0.5 mg/kg).

[0209] FIG. 144 depicts CD3+ cell counts in blood of MDA-MB-231 and huPBMC-engrafted NSG-DKO mice dosed with A) PBS control, B) illustrative B7H3×CD3 bsAb (0.5 mg/kg), C) PDL1×PDL2×CD28 XENP44676 in combination with B7H3×CD3 bsAb (respectively 5 mg/kg and 0.5 mg/kg), D) control PDL1×PDL2×RSV XENP44796 in combination with B7H3×CD3 bsAb (respectively 5 mg/kg and 0.5 mg/kg), or E) control RSV×RSV×CD28 XENP44797 in combination with B7H3×CD3 bsAb (respectively 5 mg/kg and 0.5 mg/kg) on Day 7 after first dose.

[0210] FIG. 145 depicts K_{D} binding constant, association constant (kₐ), and dissociation constant (k_{d}) for affinity-engineered anti-PDL1 clone 13G7 against human PDL1.

[0211] FIG. 146 depicts K_{D} binding constant, association constant (kₐ), and dissociation constant (k_{d}) for affinity-engineered anti-PDL1 clone 13G7 against cynomolgus PDL1.

[0212] FIG. 147 depicts K_{D} binding constant, association constant (kₐ), and dissociation constant (k_{d}) for affinity-engineered anti-PDL2 clone 16G11 against human PDL2.

[0213] FIG. 148 depicts K_{D} binding constant, association constant (kₐ), and dissociation constant (k_{d}) for affinity-engineered anti-PDL2 clone 16G11 against cynomolgus PDL2.

[0214] FIG. 149 depicts K_{D} binding constant, association constant (kₐ), and dissociation constant (k_{d}) for affinity-engineered anti-PDL1 clone 1A3A4.248 against human PDL1.

[0215] FIG. 150 depicts K_{D} binding constant, association constant (kₐ), and dissociation constant (k_{d}) for affinity-engineered anti-PDL1 clone 1A3A4.248 against cynomolgus PDL1.

[0216] FIG. 151 depicts K_{D} binding constant, association constant (kₐ), and dissociation constant (k_{d}) for affinity-engineered anti-PDL2 clone 1F12A4.249 (round 1) against human PDL2.

[0217] FIG. 152 depicts K_{D} binding constant, association constant (kₐ), and dissociation constant (k_{d}) for affinity-engineered anti-PDL2 clone 1F12A4.249 (round 1) against cynomolgus PDL2.

[0218] FIGS. 153A-153B depicts K_{D} binding constant, association constant (kₐ), and dissociation constant (k_{d}) for affinity-engineered anti-PDL2 clone 1F12A4.249 (round 2) against human PDL2.

[0219] FIGS. 154A-154B depicts K_{D} binding constant, association constant (kₐ), and dissociation constant (k_{d}) for affinity-engineered anti-PDL2 clone 1F12A4.249 (round 2) against cynomolgus PDL2.

[0220] FIG. 155 depicts induction of IL-2 secretion by 1 μg/mL illustration B7H3×CD3 bsAb in combination with PDL1×PDL2×CD28 in 1+1+1 Fab-(Fab-scFv)-Fc (with the CD28 scFv in the VHVL or VLVH orientations), 1+1+1 stackFab₂-scFv-Fc, and 1+1+1 mAb-scFv formats in the presence of A) LnCAP (PDL1^{low}PDL2^{null}), B) DU145 (PDL1^{med}PDL2^{null}), or C) LCLC103H (PDL1^{hi}PDL2^{med}) tumor cells.

[0221] FIG. 156 depicts induction of IL-2 secretion by 1 μg/mL illustration B7H3×CD3 bsAb in combination with PDL1×PDL2×CD28 in 1+1+1 stackFab₂-scFv-Fc with WT scFv (XENP43461) or with stapled scFv (XENP43462) in the presence of DU145 (PDL1^{med}PDL2^{null}) tumor cells (1:1 effector:target ratio).

[0222] FIG. 157 depicts induction of IL-2 secretion by 1 μg/mL illustrative B7H3×CD3 bsAb in combination with PDL1×PDL2×CD28 utilizing 1A7 or 1A3 CD28 binding domains in various formats and orientations in the presence of DU145 tumor cells. The data show that XENP43461 having the 1A7 binding domain outperformed triAbs in all formats having the 1A3 binding domain (PDL1 and PDL2 binding domains are matched).

[0223] FIG. 158 depicts induction of IL-2 secretion by 1 μg/mL illustrative B7H3×CD3 bsAb in combination with PDL1×PDL2×CD28 utilizing 1A7 having germline VL and affinity-optimized VHs in the presence of DU145 tumor cells. The data show that several of the full CLC triAbs achieved potency comparable to that of XENP43465.

[0224] FIG. 159 depicts EC50 of induction of IL-2 secretion by 1 μg/mL illustrative B7H3×CD3 bsAb in combination with PDL1×PDL2×CD28 utilizing 1A7 having germline VL and affinity-optimized VHs in the presence of DU145 tumor cells, as well as monovalent K_{D} for CD28 binding by the affinity-engineered 1A7 binding domains. The data show that several of the full CLC triAbs achieved potency comparable to that of XENP43465.

[0225] FIG. 160 depicts induction of IL-2 secretion by 1 μg/mL illustrative B7H3×CD3 bsAb in combination with PDL1×PDL2×CD28 utilizing 1A7 or 1A3-derived CD28 binding domains in the presence of Caki-1 tumor cells (1:1 effector:target). The data show that the 1A7-based full CLC triAb is more potent and efficacious that the 1A3-based full CLC triAb.

[0226] FIGS. 161A-161C depicts novel PDL1 binding domain clone 2A3A4.248, as well as illustrative affinity-engineered VH 2A3A4.248_H1.9 (additional variants depicted as SEQ ID NOs: 3235-3266) which may be paired with the L1 (it should be noted that the L1 is the IGKV1-39 germline sequence). Additionally, consensus framework regions (FR) and complementarity determining regions (CDRs) for 1F12A4.249 VH are depicted. As noted herein and is true for every sequence herein containing CDRs, the exact identification of the CDR locations may be slightly different depending on the numbering used as is shown in Table 2, and thus included herein are not only the CDRs that are underlined but also CDRs included within the VH and VL domains using other numbering systems. Furthermore, as for all the sequences in the Figures, these VH and VL sequences can be used either in a scFv format or in a Fab format.

[0227] FIGS. 162A-162G depicts novel PDL2 binding domain clone 1F12A4.249, as well as illustrative affinity-engineered VH 1F12A4.249_H1.45 (additional variants depicted as SEQ ID NOs: 3267-3353) which may be paired with the L1 (it should be noted that the L1 is the IGKV1-39 germline sequence). Additionally, consensus framework regions (FR) and complementarity determining regions (CDRs) for 1F12A4.249 VH are depicted. As noted herein and is true for every sequence herein containing CDRs, the exact identification of the CDR locations may be slightly different depending on the numbering used as is shown in Table 2, and thus included herein are not only the CDRs that are underlined but also CDRs included within the VH and VL domains using other numbering systems. Furthermore, as for all the sequences in the Figures, these VH and VL sequences can be used either in a scFv format or in a Fab format.

[0228] FIGS. 163A-163C depicts novel 1A7 VHs affinity-engineered to be paired with IGKV1-39 germline sequence, as well as consensus framework regions (FR) and complementarity determining regions (CDRs).

[0229] FIGS. 164A-164D depicts illustrative 1A7-based scFvs with engineered cysteines for disulfied stabilization.

[0230] FIG. 165 depicts CD28 affinity for additional 1A7 scFv variants, with or without disulfide stabilization (as denoted by [S—S]) obtained from different experiments in the context of different CD28 multispecific antibodies.

[0231] FIG. 166 depicts increase in thermostability of disulfide-stabilized 1A7 scFv.

### DETAILED DESCRIPTION

### I. Overview

[0232] Provided herein are novel anti-PD-L1, anti-PD-L2, and anti-CD28 antibodies, including novel anti-CD28×anti-PD-L1 and anti-CD28×anti-PD-L2 bispecific antibodies, and novel anti-CD28×anti-PD-L1×anti-PD-L2 trispecific antibodies. Also provided herein are methods for making and using such antibodies for the treatment of cancers. Subject bispecific and trispecific antibodies are capable of agonistically binding to CD28 costimulatory molecules on T cells and targeting to PD-L1 and/or PD-L2 on tumor cells. Thus, such antibodies selectively enhance anti-tumor activity at tumor sites while minimizing peripheral toxicity. The subject antibodies provided herein are particularly useful for enhancing anti-tumor activity when used in combination with other anti-cancer therapies.

[0233] Accordingly, in one aspect, provided herein are heterodimeric antibodies that bind to two or three different antigens. In some embodiments, the antibodies are “bispecific,” and bind two different target antigens, generally CD28 and PD-L1 or CD28 and PD-L2, as described below. In some embodiments, the antibodies are “trispecific,” and bind three different target antigens, generally CD28, PD-L1, and PD-L2, as described below. These heterodimeric antibodies can bind each of the target antigens either monovalently (e.g., there is a single antigen binding domain such as a variable heavy and variable light domain pair) or bivalently (there are two antigen binding domains that each independently bind the antigen). In some embodiments, the heterodimeric antibody provided herein includes 1) one CD28 binding domain, and 2) one PD-L1 or one PD-L2 binding domain (e.g., heterodimeric antibodies in the “1+1 Fab-scFv-Fc” format described herein). In other embodiments, the heterodimeric antibody provided herein includes 1) one CD28 binding domain, and 2) two PD-L1 or PD-L2 binding domains (e.g., heterodimeric antibodies in the “2+1 Fab₂-scFv-Fc” formats described herein). In some embodiments, the heterodimeric antibody provided herein is a trispecific antibody, that includes three different antigen binding domain that each bind a different target antigen, generally PD-L1, PD-L2, and CD28 (e.g., heterodimeric antibodies in the “1+1+1 stackFab₂-scFv-Fc,” “1+1+1 Fab-(Fab-scFv)-Fc,” “1+1+1 mAb-scFv,” and, “1+1+1 stackFab₂-Fab-Fc” formats, FIG. 83). The heterodimeric antibodies provided herein are based on the use of different monomers that contain amino acid substitutions (i.e., skew variants”) that “skew” formation of heterodimers over homodimers, as is more fully outlined below. In some embodiments, the heterodimer antibodies are also coupled with “pI variants” that allow simple purification of the heterodimers away from the homodimers, as is similarly outlined below. The heterodimeric bispecific antibodies provided generally rely on the use of engineered or variant Fc domains that can self-assemble in production cells to produce heterodimeric proteins, and methods to generate and purify such heterodimeric proteins.

### II. Nomenclature

[0234] The antibodies provided herein are listed in several different formats. In some instances, each monomer of a particular antibody is given a unique “XENP” number, although as will be appreciated in the art, a longer sequence might contain a shorter one. For example, a “scFv-Fc” monomer of a 1+1 Fab-scFv-Fc format antibody may have a first XENP number, while the scFv domain itself will have a different XENP number. Some molecules have three polypeptides, so the XENP number, with the components, is used as a name. Thus, the molecule XENP34961, which is in 2+1 Fab₂-scFv-Fc format, comprises three sequences (see FIG. 85A) a “Fab-Fc Heavy Chain” monomer (“Chain 1”); 2) a “Fab-scFv-Fc Heavy Chain” monomer (“Chain 2”); and 3) a “Light Chain” monomer or equivalents, although one of skill in the art would be able to identify these easily through sequence alignment. These XENP numbers are in the sequence listing as well as identifiers, and used in the Figures. In addition, one molecule, comprising the three components, gives rise to multiple sequence identifiers. For example, the listing of the Fab includes the full heavy chain sequence, the variable heavy domain sequence and the three CDRs of the variable heavy domain sequence, the full light chain sequence, a variable light domain sequence and the three CDRs of the variable light domain sequence. A Fab-scFv-Fc monomer includes a full-length sequence, a variable heavy domain sequence, 3 heavy CDR sequences, and an scFv sequence (include scFv variable heavy domain sequence, scFv variable light domain sequence and scFv linker). Note that some molecules herein with a scFv domain use a single charged scFv linker (+H), although others can be used. In addition, the naming nomenclature of particular antigen binding domains (e.g., PD-L1, PD-L2, and CD28 binding domains) use a “Hx.xx_Ly.yy” or “Hx.xxLy.yy” type of format, with the numbers being unique identifiers to particular variable chain sequences. Thus, the variable domain of the Fab side of PD-L1 binding domain 2G4[PDL1](e.g., FIG. 17) is “H1L1”, which indicates that the variable heavy domain, H1, was combined with the light domain L1. In the case that these sequences are used as scFvs, the designation “H1_L1” or “H1L1”, indicates that the variable heavy domain, H1 is combined with the light domain, L1, and is in VH-linker-VL orientation, from N- to C-terminus. This molecule with the identical sequences of the heavy and light variable domains but in the reverse order (VL-linker-VH orientation, from N- to C-terminus) would be designated “L1_H”. Similarly, different constructs may “mix and match” the heavy and light chains as will be evident from the sequence listing and the figures.

### III. Definitions

[0235] In order that the application may be more completely understood, several definitions are set forth below. Such definitions are meant to encompass grammatical equivalents.

[0236] By “CD28,” “Cluster of Differentiation 28,” and “Tp44” (e.g., Genebank Accession Numbers NP_001230006 (human), NP_001230007 (human), NP_006130 (human), and NP_031668 (mouse)) herein is meant a B7 receptor expressed on T cells that provides co-stimulatory signals required for T cell activation and survival. T cell stimulation through CD28 in addition to the T cell receptor (TCR) provides a potent signal for the production of various interleukins. CD28 is the receptor for CD80 (B7.1) and CD86 (B7.2) proteins. CD28 includes an intercellular domain with a YMNM motif critical for the recruitment of SH2-domain containing proteins, particularly PI3K. CD28 also includes two proline-rich motifs that are able to bind SH3-containing proteins. Exemplary CD28 sequences are depicted in FIG. 1.

[0237] By “ablation” herein is meant a decrease or removal of activity. Thus, for example, “ablating FcγR binding” means the Fc region amino acid variant has less than 50% starting binding as compared to an Fc region not containing the specific variant, with more than 70-80-90-95-98% loss of activity being preferred, and in general, with the activity being below the level of detectable binding in a Biacore, SPR or BLI assay. Of particular use in the ablation of FcγR binding are those shown in FIG. 5, which generally are added to both monomers.

[0238] By “ADCC” or “antibody dependent cell-mediated cytotoxicity” as used herein is meant the cell-mediated reaction, wherein nonspecific cytotoxic cells that express FcγRs recognize bound antibody on a target cell and subsequently cause lysis of the target cell. ADCC is correlated with binding to FcγRIIIa; increased binding to FcγRIIIa leads to an increase in ADCC activity.

[0239] By “ADCP” or antibody dependent cell-mediated phagocytosis as used herein is meant the cell-mediated reaction wherein nonspecific phagocytic cells that express FcγRs recognize bound antibody on a target cell and subsequently cause phagocytosis of the target cell.

[0240] As used herein, the term “antibody” is used generally. Antibodies provided herein can take on a number of formats as described herein, including traditional antibodies as well as antibody derivatives, fragments and mimetics, described herein.

[0241] Traditional immunoglobulin (Ig) antibodies are “Y” shaped tetramers. Each tetramer is typically composed of two identical pairs of polypeptide chains, each pair having one “light chain” monomer (typically having a molecular weight of about 25 kDa) and one “heavy chain” monomer (typically having a molecular weight of about 50-70 kDa).

[0242] Useful bispecific antibody formats include, but are not limited to, the “1+1 Fab-scFv-Fc,” “2+1 Fab₂-scFv-Fc,” “1+1 common light chain,” and “2+1 common light chain” formats provided herein (see, e.g., FIG. 82). Useful trispecific antibody formats include, but are not limited to, 1+1+1 stackFab₂-scFv-Fc,” “1+1+1 Fab-(Fab-scFv)-Fc,” “1+1+1 mAb-scFv,” and, “1+1+1 stackFab₂-Fab-Fc” formats (see, e.g., FIG. 83). Additional useful antibody formats include, but are not limited to, “mAb-Fv,” “mAb-scFv,” “central-Fv”, “one armed scFv-mAb,” “scFv-mAb,” “dual scFv,” and “trident” format antibodies, as disclosed in US20180127501A1, which is incorporated by reference herein, particularly in pertinent part relating to antibody formats (see, e.g., FIG. 2).

[0243] Antibody heavy chains typically include a variable heavy (VH) domain, which includes vhCDR1-3, and an Fc domain, which includes a CH2-CH3 monomer. In some embodiments, antibody heavy chains include a hinge and CH1 domain. Traditional antibody heavy chains are monomers that are organized, from N- to C-terminus: VH-CH1-hinge-CH2-CH3. The CH1-hinge-CH2-CH3 is collectively referred to as the heavy chain “constant domain” or “constant region” of the antibody, of which there are five different categories or “isotypes”: IgA, IgD, IgG, IgE and IgM.

[0244] In some embodiments, the antibodies provided herein include IgG isotype constant domains, which has several subclasses, including, but not limited to IgG1, IgG2, IgG3, and IgG4. In the IgG subclass of immunoglobulins, there are several immunoglobulin domains in the heavy chain. By “immunoglobulin (Ig) domain” herein is meant a region of an immunoglobulin having a distinct tertiary structure. Of interest in the present invention are the heavy chain domains, including, the constant heavy (CH) domains and the hinge domains. In the context of IgG antibodies, the IgG isotypes each have three CH regions. Accordingly, “CH” domains in the context of IgG are as follows: “CH1” refers to positions 118-215 according to the EU index as in Kabat. “Hinge” refers to positions 216-230 according to the EU index as in Kabat. “CH2” refers to positions 231-340 according to the EU index as in Kabat, and “CH3” refers to positions 341-447 according to the EU index as in Kabat. As shown in Table 1, the exact numbering and placement of the heavy chain domains can be different among different numbering systems. As shown herein and described below, the pI variants can be in one or more of the CH regions, as well as the hinge region, discussed below.

[0245] It should be noted that IgG1 has different allotypes with polymorphisms at 356 (D or E) and 358 (L or M). The sequences depicted herein use the 356E/358M allotype, however the other allotype is included herein. That is, any sequence inclusive of an IgG1 Fc domain included herein can have 356D/358L replacing the 356E/358M allotype. It should be understood that therapeutic antibodies can also comprise hybrids of isotypes and/or subclasses. For example, as shown in US Publication 2009/0163699, incorporated by reference, the present antibodies, in some embodiments, include human IgG1/G2 hybrids.

[0246] By “Fc” or “Fc region” or “Fc domain” as used herein is meant the polypeptide comprising the constant region of an antibody, in some instances, excluding all of the first constant region immunoglobulin domain (e.g., CH1) or a portion thereof, and in some cases, optionally including all or part of the hinge. For IgG, the Fc domain comprises immunoglobulin domains CH2 and CH3 (Cγ2 and Cγ3), and optionally all or a portion of the hinge region between CH1 (Cγ1) and CH2 (Cγ2). Thus, in some cases, the Fc domain includes, from N- to C-terminal, CH2-CH3 and hinge-CH2-CH3. In some embodiments, the Fc domain is that from IgG1, IgG2, IgG3 or IgG4, with IgG1 hinge-CH2-CH3 and IgG4 hinge-CH2-CH3 finding particular use in many embodiments. Additionally, in the case of human IgG1 Fc domains, the hinge may include a C220S amino acid substitution. Furthermore, in the case of human IgG4 Fc domains, the hinge may include a S228P amino acid substitution. Although the boundaries of the Fc region may vary, the human IgG heavy chain Fc region is usually defined to include residues E216, C226, or A231 to its carboxyl-terminal, wherein the numbering is according to the EU index as in Kabat. In some embodiments, as is more fully described below, amino acid modifications are made to the Fc region, for example to alter binding to one or more FcγR or to the FcRn.

[0247] By “heavy chain constant region” herein is meant the CH1-hinge-CH2-CH3 portion of an antibody (or fragments thereof), excluding the variable heavy domain; in EU numbering of human IgG1 this is amino acids 118-447. By “heavy chain constant region fragment” herein is meant a heavy chain constant region that contains fewer amino acids from either or both of the N- and C-termini but still retains the ability to form a dimer with another heavy chain constant region.

[0248] Another type of domain of the heavy chain is the hinge region. By “hinge” or “hinge region” or “antibody hinge region” or “hinge domain” herein is meant the flexible polypeptide comprising the amino acids between the first and second constant domains of an antibody. Structurally, the IgG CH1 domain ends at EU position 215, and the IgG CH2 domain begins at residue EU position 231. Thus for IgG the antibody hinge is herein defined to include positions 216 (E216 in IgG1) to 230 (P230 in IgG1), wherein the numbering is according to the EU index as in Kabat. In some cases, a “hinge fragment” is used, which contains fewer amino acids at either or both of the N- and C-termini of the hinge domain. As noted herein, pI variants can be made in the hinge region as well. Many of the antibodies herein have at least one the cysteines at position 220 according to EU numbering (hinge region) replaced by a serine. Generally, this modification is on the “scFv monomer” side for most of the sequences depicted herein, although it can also be on the “Fab monomer” side, or both, to reduce disulfide formation. Specifically included within the sequences herein are one or both of these cysteines replaced (C220S).

[0249] As will be appreciated by those in the art, the exact numbering and placement of the heavy chain constant region domains (i.e., CH1, hinge, CH2 and CH3 domains) can be different among different numbering systems. A useful comparison of heavy constant region numbering according to EU and Kabat is as below, see Edelman et al., 1969, Proc Natl Acad Sci USA 63:78-85 and Kabat et al., 1991, Sequences of Proteins of Immunological Interest, 5th Ed., United States Public Health Service, National Institutes of Health, Bethesda, entirely incorporated by reference.

TABLE 1

| | EU Numbering | Kabat Numbering |
|---|---|---|
| CH1 | 118-215 | 114-223 |
| Hinge | 216-230 | 226-243 |
| CH2 | 231-340 | 244-360 |
| CH3 | 341-447 | 361-478 |

[0250] The antibody light chain generally comprises two domains: the variable light domain (VL), which includes light chain CDRs vlCDR1-3, and a constant light chain region (often referred to as CL or Cκ). The antibody light chain is typically organized from N- to C-terminus: VL-CL.

[0251] By “antigen binding domain” or “ABD” herein is meant a set of six Complementary Determining Regions (CDRs) that, when present as part of a polypeptide sequence, specifically binds a target antigen (e.g., PD-L1 or CD28) as discussed herein. As is known in the art, these CDRs are generally present as a first set of variable heavy CDRs (vhCDRs or VHCDRs) and a second set of variable light CDRs (vlCDRs or VLCDRs), each comprising three CDRs: vhCDR1, vhCDR2, vhCDR3 variable heavy CDRs and vlCDR1, vlCDR2 and vlCDR3 vhCDR3 variable light CDRs. The CDRs are present in the variable heavy domain (vhCDR1-3) and variable light domain (vlCDR1-3). The variable heavy domain and variable light domain from an Fv region.

[0252] The present invention provides a large number of different CDR sets. In this case, a “full CDR set” comprises the three variable light and three variable heavy CDRs, e.g., a vlCDR1, vlCDR2, vlCDR3, vhCDR1, vhCDR2 and vhCDR3. These can be part of a larger variable light or variable heavy domain, respectfully. In addition, as more fully outlined herein, the variable heavy and variable light domains can be on separate polypeptide chains, when a heavy and light chain is used (for example when Fabs are used), or on a single polypeptide chain in the case of scFv sequences.

[0253] As will be appreciated by those in the art, the exact numbering and placement of the CDRs can be different among different numbering systems. However, it should be understood that the disclosure of a variable heavy and/or variable light sequence includes the disclosure of the associated (inherent) CDRs. Accordingly, the disclosure of each variable heavy region is a disclosure of the vhCDRs (e.g., vhCDR1, vhCDR2 and vhCDR3) and the disclosure of each variable light region is a disclosure of the vlCDRs (e.g., vlCDR1, vlCDR2 and vlCDR3). A useful comparison of CDR numbering is as below, see Lafranc et al., Dev. Comp. Immunol. 27(1):55-77 (2003):

TABLE 2

| | Kabat+ | | | | | | |
|---|---|---|---|---|---|---|---|
| | Chothia | IMGT | Kabat | AbM | Chothia | Contact | Xencor |
| vhCDR1 | 26-35 | 27-38 | 31-35 | 26-35 | 26-32 | 30-35 | 27-35 |
| vhCDR2 | 50-65 | 56-65 | 50-65 | 50-58 | 52-56 | 47-58 | 54-61 |
| vhCDR3 | 95-102 | 105-117 | 95-102 | 95-102 | 95-102 | 93-101 | 103-116 |
| vlCDR1 | 24-34 | 27-38 | 24-34 | 24-34 | 24-34 | 30-36 | 27-38 |
| vlCDR2 | 50-56 | 56-65 | 50-56 | 50-56 | 50-56 | 46-55 | 56-62 |
| vlCDR3 | 89-97 | 105-117 | 89-97 | 89-97 | 89-97 | 89-96 | 97-105 |

[0254] Throughout the present specification, the Kabat numbering system is generally used when referring to a residue in the variable domain (approximately, residues 1-107 of the light chain variable region and residues 1-113 of the heavy chain variable region) and the EU numbering system for Fc regions (e.g., Kabat et al., supra (1991)).

[0255] The CDRs contribute to the formation of the antigen-binding, or more specifically, epitope binding site of the antigen binding domains and antibodies. “Epitope” refers to a determinant that interacts with a specific antigen binding site in the variable region of an antibody molecule known as a paratope. Epitopes are groupings of molecules such as amino acids or sugar side chains and usually have specific structural characteristics, as well as specific charge characteristics. A single antigen may have more than one epitope.

[0256] The epitope may comprise amino acid residues directly involved in the binding (also called immunodominant component of the epitope) and other amino acid residues, which are not directly involved in the binding, such as amino acid residues which are effectively blocked by the specifically antigen binding peptide; in other words, the amino acid residue is within the footprint of the specifically antigen binding peptide.

[0257] Epitopes may be either conformational or linear. A conformational epitope is produced by spatially juxtaposed amino acids from different segments of the linear polypeptide chain. A linear epitope is one produced by adjacent amino acid residues in a polypeptide chain. Conformational and nonconformational epitopes may be distinguished in that the binding to the former but not the latter is lost in the presence of denaturing solvents.

[0258] An epitope typically includes at least 3, and more usually, at least 5 or 8-10 amino acids in a unique spatial conformation. Antibodies that recognize the same epitope can be verified in a simple immunoassay showing the ability of one antibody to block the binding of another antibody to a target antigen, for example “binning.” As outlined below, the invention not only includes the enumerated antigen binding domains and antibodies herein, but those that compete for binding with the epitopes bound by the enumerated antigen binding domains.

[0259] In some embodiments, the six CDRs of the antigen binding domain are contributed by a variable heavy and a variable light domain. In a “Fab” format, the set of 6 CDRs are contributed by two different polypeptide sequences, the variable heavy domain (vh or VH; containing the vhCDR1, vhCDR2 and vhCDR3) and the variable light domain (vl or VL; containing the vlCDR1, vlCDR2 and vlCDR3), with the C-terminus of the vh domain being attached to the N-terminus of the CH1 domain of the heavy chain and the C-terminus of the vl domain being attached to the N-terminus of the constant light domain (and thus forming the light chain). In a scFv format, the vh and vl domains are covalently attached, generally through the use of a linker (a “scFv linker”) as outlined herein, into a single polypeptide sequence, which can be either (starting from the N-terminus) vh-linker-vl or vl-linker-vh, with the former being generally preferred (including optional domain linkers on each side, depending on the format used (e.g., from FIG. 26). In general, the C-terminus of the scFv domain is attached to the N-terminus of the hinge in the second monomer.

[0260] By “variable region” or “variable domain” as used herein is meant the region of an immunoglobulin that comprises one or more Ig domains substantially encoded by any of the Vx, VW, and/or VH genes that make up the kappa, lambda, and heavy chain immunoglobulin genetic loci respectively, and contains the CDRs that confer antigen specificity. Thus, a “variable heavy domain” pairs with a “variable light domain” to form an antigen binding domain (“ABD”). In addition, each variable domain comprises three hypervariable regions (“complementary determining regions,” “CDRs”) (vhCDR1, vhCDR2 and vhCDR3 for the variable heavy domain and vlCDR1, vlCDR2 and vlCDR3 for the variable light domain) and four framework (FR) regions, arranged from amino-terminus to carboxy-terminus in the following order: FR1-CDR1-FR2-CDR2-FR3-CDR3-FR4.

[0261] By “Fab” or “Fab region” as used herein is meant the antibody region that comprises the VH, CH1, VL, and CL immunoglobulin domains, generally on two different polypeptide chains (e.g., VH-CH1 on one chain and VL-CL on the other). Fab may refer to this region in isolation, or this region in the context of a bispecific antibody of the invention. In the context of a Fab, the Fab comprises an Fv region in addition to the CH1 and CL domains.

[0262] By “Fv” or “Fv fragment” or “Fv region” as used herein is meant the antibody region that comprises the VL and VH domains. Fv regions can be formatted as both Fabs (as discussed above, generally two different polypeptides that also include the constant regions as outlined above) and single chain Fvs (scFvs), where the vl and vh domains are included in a single peptide, attached generally with a linker as discussed herein.

[0263] By “single chain Fv” or “scFv” herein is meant a variable heavy domain covalently attached to a variable light domain, generally using a scFv linker as discussed herein, to form a scFv or scFv domain. A scFv domain can be in either orientation from N- to C-terminus (vh-linker-vl or vl-linker-vh). In the sequences depicted in the sequence listing and in the figures, the order of the vh and vl domain is indicated in the name, e.g., H.X_L.Y means N- to C-terminal is vh-linker-vl, and L.Y_H.X is vl-linker-vh.

[0264] Some embodiments of the subject antibodies provided herein comprise at least one scFv domain, which, while not naturally occurring, generally includes a variable heavy domain and a variable light domain, linked together by a scFv linker. As outlined herein, while the scFv domain is generally from N- to C-terminus oriented as VH-scFv linker-VL, this can be reversed for any of the scFv domains (or those constructed using vh and vl sequences from Fabs), to VL-scFv linker-VH, with optional linkers at one or both ends depending on the format.

[0265] By “modification” or “variant” herein is meant an amino acid substitution, insertion, and/or deletion in a polypeptide sequence or an alteration to a moiety chemically linked to a protein. For example, a modification may be an altered carbohydrate or PEG structure attached to a protein. By “amino acid modification” herein is meant an amino acid substitution, insertion, and/or deletion in a polypeptide sequence. For clarity, unless otherwise noted, the amino acid modification is always to an amino acid coded for by DNA, e.g., the 20 amino acids that have codons in DNA and RNA.

[0266] By “amino acid substitution” or “substitution” herein is meant the replacement of an amino acid at a particular position in a parent polypeptide sequence with a different amino acid. In particular, in some embodiments, the substitution is to an amino acid that is not naturally occurring at the particular position, either not naturally occurring within the organism or in any organism. For example, the substitution E272Y refers to a variant polypeptide, in this case an Fc variant, in which the glutamic acid at position 272 is replaced with tyrosine. For clarity, a protein which has been engineered to change the nucleic acid coding sequence but not change the starting amino acid (for example exchanging CGG (encoding arginine) to CGA (still encoding arginine) to increase host organism expression levels) is not an “amino acid substitution;” that is, despite the creation of a new gene encoding the same protein, if the protein has the same amino acid at the particular position that it started with, it is not an amino acid substitution.

[0267] By “amino acid insertion” or “insertion” as used herein is meant the addition of an amino acid sequence at a particular position in a parent polypeptide sequence. For example, −233E or 233E designates an insertion of glutamic acid after position 233 and before position 234. Additionally, −233ADE or A233ADE designates an insertion of AlaAspGlu after position 233 and before position 234.

[0268] By “amino acid deletion” or “deletion” as used herein is meant the removal of an amino acid sequence at a particular position in a parent polypeptide sequence. For example, E233- or E233 #, E233( ) or E233del designates a deletion of glutamic acid at position 233. Additionally, EDA233- or EDA233 # designates a deletion of the sequence GluAspAla that begins at position 233.

[0269] By “variant protein” or “protein variant”, or “variant” as used herein is meant a protein that differs from that of a parent protein by virtue of at least one amino acid modification. The protein variant has at least one amino acid modification compared to the parent protein, yet not so many that the variant protein will not align with the parental protein using an alignment program such as that described below. In general, variant proteins (such as variant Fc domains, etc., outlined herein, are generally at least 75, 80, 85, 90, 91, 92, 93, 94, 95, 96, 97, 98 or 99% identical to the parent protein, using the alignment programs described below, such as BLAST.

[0270] “Variant” as used herein also refers to particular amino acid modifications that confer particular function (e.g., a “heterodimerization variant,” “pI variant,” “ablation variant,” etc.).

[0271] As described below, in some embodiments the parent polypeptide, for example an Fc parent polypeptide, is a human wild-type sequence, such as the heavy constant domain or Fc region from IgG1, IgG2, IgG3 or IgG4, although human sequences with variants can also serve as “parent polypeptides”, for example the IgG1/2 hybrid of US Publication 2006/0134105 can be included. The protein variant sequence herein will preferably possess at least about 80% identity with a parent protein sequence, and most preferably at least about 90% identity, more preferably at least about 95-98-99% identity. Accordingly, by “antibody variant” or “variant antibody” as used herein is meant an antibody that differs from a parent antibody by virtue of at least one amino acid modification, “IgG variant” or “variant IgG” as used herein is meant an antibody that differs from a parent IgG (again, in many cases, from a human IgG sequence) by virtue of at least one amino acid modification, and “immunoglobulin variant” or “variant immunoglobulin” as used herein is meant an immunoglobulin sequence that differs from that of a parent immunoglobulin sequence by virtue of at least one amino acid modification. “Fc variant” or “variant Fc” as used herein is meant a protein comprising an amino acid modification in an Fc domain as compared to an Fc domain of human IgG1, IgG2 or IgG4.

[0272] “Fc variant” or “variant Fc” as used herein is meant a protein comprising an amino acid modification in an Fc domain. The modification can be an addition, deletion, or substitution. The Fc variants are defined according to the amino acid modifications that compose them. Thus, for example, N434S or 434S is an Fc variant with the substitution for serine at position 434 relative to the parent Fc polypeptide, wherein the numbering is according to the EU index. Likewise, M428L/N434S defines an Fc variant with the substitutions M428L and N434S relative to the parent Fc polypeptide. The identity of the WT amino acid may be unspecified, in which case the aforementioned variant is referred to as 428L/434S. It is noted that the order in which substitutions are provided is arbitrary, that is to say that, for example, 428L/434S is the same Fc variant as 434S/428L, and so on. For all positions discussed herein that relate to antibodies or derivatives and fragments thereof (e.g., Fe domains), unless otherwise noted, amino acid position numbering is according to the EU index. The “EU index” or “EU index as in Kabat” or “EU numbering” scheme refers to the numbering of the EU antibody (Edelman et al., 1969, Proc Natl Acad Sci USA 63:78-85, hereby entirely incorporated by reference). The modification can be an addition, deletion, or substitution.

[0273] In general, variant Fc domains have at least about 80, 85, 90, 95, 97, 98 or 99 percent identity to the corresponding parental human IgG Fc domain (using the identity algorithms discussed below, with one embodiment utilizing the BLAST algorithm as is known in the art, using default parameters). Alternatively, the variant Fc domains can have from 1, 2, 3, 4, 5, 6, 7, 8, 9, 10, 11, 12, 13, 14, 15, 16, 11, 12, 13, 14, 15, 16, 17, 18, 19 or 20 amino acid modifications as compared to the parental Fc domain. Alternatively, the variant Fc domains can have up to 1, 2, 3, 4, 5, 6, 7, 8, 9, 10, 11, 12, 13, 14, 15, 16, 11, 12, 13, 14, 15, 16, 17, 18, 19 or 20 amino acid modifications as compared to the parental Fc domain. Additionally, as discussed herein, the variant Fc domains described herein still retain the ability to form a dimer with another Fc domain as measured using known techniques as described herein, such as non-denaturing gel electrophoresis.

[0274] By “protein” as used herein is meant at least two covalently attached amino acids, which includes proteins, polypeptides, oligopeptides and peptides. In addition, polypeptides that make up the antibodies of the invention may include synthetic derivatization of one or more side chains or termini, glycosylation, PEGylation, circular permutation, cyclization, linkers to other molecules, fusion to proteins or protein domains, and addition of peptide tags or labels.

[0275] By “residue” as used herein is meant a position in a protein and its associated amino acid identity. For example, Asparagine 297 (also referred to as Asn297 or N297) is a residue at position 297 in the human antibody IgG1.

[0276] By “IgG subclass modification” or “isotype modification” as used herein is meant an amino acid modification that converts one amino acid of one IgG isotype to the corresponding amino acid in a different, aligned IgG isotype. For example, because IgG1 comprises a tyrosine and IgG2 a phenylalanine at EU position 296, a F296Y substitution in IgG2 is considered an IgG subclass modification.

[0277] By “non-naturally occurring modification” as used herein is meant an amino acid modification that is not isotypic. For example, because none of the human IgGs comprise a serine at position 434, the substitution 434S in IgG1, IgG2, IgG3, or IgG4 (or hybrids thereof) is considered a non-naturally occurring modification.

[0278] By “amino acid” and “amino acid identity” as used herein is meant one of the 20 naturally occurring amino acids that are coded for by DNA and RNA.

[0279] By “effector function” as used herein is meant a biochemical event that results from the interaction of an antibody Fc region with an Fc receptor or ligand. Effector functions include but are not limited to ADCC, ADCP, and CDC.

[0280] By “IgG Fc ligand” as used herein is meant a molecule, preferably a polypeptide, from any organism that binds to the Fc region of an IgG antibody to form an Fc/Fc ligand complex. Fc ligands include but are not limited to FcγRIs, FcγRIIs, FcγRIIIs, FcRn, C1q, C3, mannan binding lectin, mannose receptor, staphylococcal protein A, streptococcal protein G, and viral FcγR. Fc ligands also include Fc receptor homologs (FcRH), which are a family of Fc receptors that are homologous to the FcγRs (Davis et al., 2002, Immunological Reviews 190:123-136, entirely incorporated by reference). Fc ligands may include undiscovered molecules that bind Fc. Particular IgG Fc ligands are FcRn and Fc gamma receptors. By “Fc ligand” as used herein is meant a molecule, preferably a polypeptide, from any organism that binds to the Fc region of an antibody to form an Fc/Fc ligand complex.

[0281] By “Fc gamma receptor”, “FcγR” or “FcgammaR” as used herein is meant any member of the family of proteins that bind the IgG antibody Fc region and is encoded by an FcγR gene. In humans this family includes but is not limited to FcγRI (CD64), including isoforms FcγRIa, FcγRIb, and FcγRIc; FcγRII (CD32), including isoforms FcγRIIa (including allotypes H131 and R131), FcγRIIb (including FcγRIIb-1 and FcγRIIb-2), and FcγRIIc; and FcγRIII (CD16), including isoforms FcγRIIIa (including allotypes V158 and F158) and FcγRIIIb (including allotypes FcγRIIb-NA1 and FcγRIIb-NA2) (Jefferis et al., 2002, Immunol Lett 82:57-65, entirely incorporated by reference), as well as any undiscovered human FcγRs or FcγR isoforms or allotypes. An FcγR may be from any organism, including but not limited to humans, mice, rats, rabbits, and monkeys. Mouse FcγRs include but are not limited to FcγRI (CD64), FcγRII (CD32), FcγRIII (CD16), and FcγRIII-2 (CD16-2), as well as any undiscovered mouse FcγRs or FcγR isoforms or allotypes.

[0282] By “FcRn” or “neonatal Fc Receptor” as used herein is meant a protein that binds the IgG antibody Fc region and is encoded at least in part by an FcRn gene. The FcRn may be from any organism, including but not limited to humans, mice, rats, rabbits, and monkeys. As is known in the art, the functional FcRn protein comprises two polypeptides, often referred to as the heavy chain and light chain. The light chain is beta-2-microglobulin and the heavy chain is encoded by the FcRn gene. Unless otherwise noted herein, FcRn or an FcRn protein refers to the complex of FcRn heavy chain with beta-2-microglobulin. A variety of FcRn variants used to increase binding to the FcRn receptor, and in some cases, to increase serum half-life. An “FcRn variant” is an amino acid modification that contributes to increased binding to the FcRn receptor, and suitable FcRn variants are shown below.

[0283] By “parent polypeptide” as used herein is meant a starting polypeptide that is subsequently modified to generate a variant. The parent polypeptide may be a naturally occurring polypeptide, or a variant or engineered version of a naturally occurring polypeptide. Accordingly, by “parent immunoglobulin” as used herein is meant an unmodified immunoglobulin polypeptide that is modified to generate a variant, and by “parent antibody” as used herein is meant an unmodified antibody that is modified to generate a variant antibody. It should be noted that “parent antibody” includes known commercial, recombinantly produced antibodies as outlined below. In this context, a “parent Fc domain” will be relative to the recited variant; thus, a “variant human IgG1 Fc domain” is compared to the parent Fc domain of human IgG1, a “variant human IgG4 Fc domain” is compared to the parent Fc domain human IgG4, etc.

[0284] By “position” as used herein is meant a location in the sequence of a protein. Positions may be numbered sequentially, or according to an established format, for example the EU index for numbering of antibody domains (e.g., a CH1, CH2, CH3 or hinge domain).

[0285] By “target antigen” as used herein is meant the molecule that is bound specifically by the antigen binding domain comprising the variable regions of a given antibody.

[0286] By “strandedness” in the context of the monomers of the heterodimeric antibodies of the invention herein is meant that, similar to the two strands of DNA that “match”, heterodimerization variants are incorporated into each monomer so as to preserve the ability to “match” to form heterodimers. For example, if some pI variants are engineered into monomer A (e.g., making the pI higher) then steric variants that are “charge pairs” that can be utilized as well do not interfere with the pI variants, e.g., the charge variants that make a pI higher are put on the same “strand” or “monomer” to preserve both functionalities. Similarly, for “skew” variants that come in pairs of a set as more fully outlined below, the skilled artisan will consider pI in deciding into which strand or monomer one set of the pair will go, such that pI separation is maximized using the pI of the skews as well.

[0287] By “target cell” as used herein is meant a cell that expresses a target antigen.

[0288] By “host cell” in the context of producing a bispecific antibody according to the invention herein is meant a cell that contains the exogeneous nucleic acids encoding the components of the bispecific antibody and is capable of expressing the bispecific antibody under suitable conditions. Suitable host cells are discussed below.

[0289] By “wild type” or “WT” herein is meant an amino acid sequence or a nucleotide sequence that is found in nature, including allelic variations. A WT protein has an amino acid sequence or a nucleotide sequence that has not been intentionally modified.

[0290] Provided herein are a number of antibody domains (e.g., Fc domains) that have sequence identity to human antibody domains. Sequence identity between two similar sequences (e.g., antibody variable domains) can be measured by algorithms such as that of Smith, T. F. & Waterman, M. S. (1981) “Comparison Of Biosequences,” Adv. Appl. Math. 2:482 [local homology algorithm]; Needleman, S. B. & Wunsch, C D. (1970) “A General Method Applicable To The Search For Similarities In The Amino Acid Sequence Of Two Proteins,” J. Mol. Biol. 48:443 [homology alignment algorithm], Pearson, W. R. & Lipman, D. J. (1988) “Improved Tools For Biological Sequence Comparison,” Proc. Natl. Acad. Sci. (U.S.A.) 85:2444 [search for similarity method]; or Altschul, S. F. et al, (1990) “Basic Local Alignment Search Tool,” J. Mol. Biol. 215:403-10, the “BLAST” algorithm, see https://blast.ncbi.nlm.nih.gov/Blast.cgi. When using any of the aforementioned algorithms, the default parameters (for Window length, gap penalty, etc.) are used. In one embodiment, sequence identity is done using the BLAST algorithm, using default parameters

[0291] The antibodies of the present invention are generally isolated or recombinant. “Isolated,” when used to describe the various polypeptides disclosed herein, means a polypeptide that has been identified and separated and/or recovered from a cell or cell culture from which it was expressed. Ordinarily, an isolated polypeptide will be prepared by at least one purification step. An “isolated antibody,” refers to an antibody which is substantially free of other antibodies having different antigenic specificities. “Recombinant” means the antibodies are generated using recombinant nucleic acid techniques in exogeneous host cells, and they can be isolated as well.

[0292] “Specific binding” or “specifically binds to” or is “specific for” a particular antigen or an epitope means binding that is measurably different from a non-specific interaction. Specific binding can be measured, for example, by determining binding of a molecule compared to binding of a control molecule, which generally is a molecule of similar structure that does not have binding activity. For example, specific binding can be determined by competition with a control molecule that is similar to the target.

[0293] Specific binding for a particular antigen or an epitope can be exhibited, for example, by an antibody having a KD for an antigen or epitope of at least about 10⁻⁴ M, at least about 10⁻⁵ M, at least about 10⁻⁶ M, at least about 10⁻⁷ M, at least about 10⁻⁸ M, at least about 10⁻⁹ M, alternatively at least about 10⁻¹⁰ M, at least about 10⁻¹¹ M, at least about 10⁻¹² M, or greater, where KD refers to a dissociation rate of a particular antibody-antigen interaction. Typically, an antibody that specifically binds an antigen will have a KD that is 20-, 50-, 100-, 500-, 1000-, 5,000-, 10,000- or more times greater for a control molecule relative to the antigen or epitope.

[0294] Also, specific binding for a particular antigen or an epitope can be exhibited, for example, by an antibody having a KA or Ka for an antigen or epitope of at least 20-, 50-, 100-, 500-, 1000-, 5,000-, 10,000- or more times greater for the epitope relative to a control, where KA or Ka refers to an association rate of a particular antibody-antigen interaction. Binding affinity is generally measured using a Biacore, SPR or BLI assay.

### IV. PD-L1, PD-L2, and CD28 Antigen Binding Domains

[0295] Provided herein are antigen binding domains (ABDs) and ABD compositions that bind either PD-L1, PD-L2, or CD28. In some embodiments, one or more of the ABDs are included in an antibody format described herein including, any of the bispecific and trispecific formats in FIGS. 82 and 83.

### A. PD-L1 Antigen Binding Domains

[0296] In one aspect, provided herein are PD-L1 antigen binding domains (ABDs) and compositions that include such PD-L1 antigen binding domains (ABDs), including anti-PD-L1 antibodies (e.g., anti-PD-L1×anti-CD28 bispecific antibodies, and anti-PD-L1×anti-PD-L2×anti-CD28 trispecific antibodies). Such PD-L1 binding domains and related antibodies (e.g., bispecific and trispecific antibodies disclosed herein) find use, for example, in the treatment of PD-L1 associated cancers. In some embodiments, the PD-L1 ABDs are capable of binding to human and cynomolgus PD-L1 (see FIG. 1 and Example 1).

[0297] As will be appreciated by those in the art, suitable PD-L1 binding domains can comprise a set of 6 CDRs as depicted in FIGS. 25 and 26 and the Sequence Listing. Suitable PD-L1 ABDs can also include the entire VH and VL sequences as depicted in these sequences and FIGS. 25 and 26, and the Sequence Listing, used as scFvs or as Fab domains.

[0298] In one embodiment, the PD-L1 antigen binding domain includes the 6 CDRs (i.e., vhCDR1-3 and vlCDR1-3) of a PD-L1 ABD described herein, including FIGS. 25 and 26, and the Sequence Listing, either as the CDRs are underlined or, in the case where a different numbering scheme is used as described herein and as shown in Table 2, as the CDRs that are identified using other alignments within the variable heavy (VH) domain and variable light domain (VL) sequences of those depicted in FIGS. 25 and 26, and the Sequence Listing (see Table 2). Suitable PD-L1 ABDs can also include the entire VH and VL sequences as depicted in these sequences and figures, used as scFvs or as Fab domains.

[0299] In one embodiment, the PD-L1 antigen binding domain includes the 6 CDRs (i.e., vhCDR1-3 and vlCDR1-3) of an PD-L1 ABD described herein, including FIGS. 25 and 26, and the Sequence Listing. In exemplary embodiments, the PD-L1 antigen binding domain comprises the 6 CDRs of a PD-L1 comprising a variable heavy domain (VH) and a variable light domain (VL), wherein VH and VL selected from the following:
[0300] (i) a VH comprising a VH CDR1, a VH CDR2, and a VH CDR3 having an amino acid sequence of a VH CDR1, a VH CDR2, and a VH CDR3, respectively, of a VH having an amino acid sequence of SEQ ID NO:21; and (ii) a VL comprising a VL CDR1, a VL CDR2, and a VL CDR3 having an amino acid sequence of a VL CDR1, a VL CDR2, and a VL CDR3, respectively, of a VL having an amino acid sequence of SEQ ID NO:25; and
[0301] (i) a VH comprising a VH CDR1, a VH CDR2, and a VH CDR3 having an amino acid sequence of a VH CDR1, a VH CDR2, and a VH CDR3, respectively, of a VH having an amino acid sequence of SEQ ID NO:29; and (ii) a VL comprising a VL CDR1, a VL CDR2, and a VL CDR3 having an amino acid sequence of a VL CDR1, a VL CDR2, and a VL CDR3, respectively, of a VL having an amino acid sequence of SEQ ID NO:33;
[0302] (i) a VH comprising a VH CDR1, a VH CDR2, and a VH CDR3 having an amino acid sequence of a VH CDR1, a VH CDR2, and a VH CDR3, respectively, of a VH having an amino acid sequence of SEQ ID NO:37; and (ii) a VL comprising a VL CDR1, a VL CDR2, and a VL CDR3 having an amino acid sequence of a VL CDR1, a VL CDR2, and a VL CDR3, respectively, of a VL having an amino acid sequence of SEQ ID NO:33;
[0303] (i) a VH comprising a VH CDR1, a VH CDR2, and a VH CDR3 having an amino acid sequence of a VH CDR1, a VH CDR2, and a VH CDR3, respectively, of a VH having an amino acid sequence of SEQ ID NO:29; and (ii) a VL comprising a VL CDR1, a VL CDR2, and a VL CDR3 having an amino acid sequence of a VL CDR1, a VL CDR2, and a VL CDR3, respectively, of a VL having an amino acid sequence of SEQ ID NO:20;
[0304] (i) a VH comprising a VH CDR1, a VH CDR2, and a VH CDR3 having an amino acid sequence of a VH CDR1, a VH CDR2, and a VH CDR3, respectively, of a VH having an amino acid sequence of SEQ ID NO:37; and (ii) a VL comprising a VL CDR1, a VL CDR2, and a VL CDR3 having an amino acid sequence of a VL CDR1, a VL CDR2, and a VL CDR3, respectively, of a VL having an amino acid sequence of SEQ ID NO:20 (FIGS. 24-26).

[0305] In addition to the parental CDR sets disclosed in the figures and sequence listing that form an ABD to PD-L1, provided herein are variant PD-L1 ABDS having CDRs that include at least one modification of the PD-L1 ABD CDRs disclosed herein. In one embodiment, the PD-L1 ABD includes a set of 6 CDRs with 1, 2, 3, 4, 5, 6, 7, 8, 9, 10 amino acid modifications as compared to the 6 CDRs of an PD-L1 ABD described herein, including the figures and sequence listing. In exemplary embodiments, the PD-L1 ABD includes a set of 6 CDRs with 1, 2, 3, 4, 5, 6, 7, 8, 9, 10 amino acid modifications as compared to the 6 CDRs of an PD-L1 ABD comprising a variable heavy domain (VH) and a variable light domain (VL) selected from the following:
[0306] (i) a VH comprising a VH CDR1, a VH CDR2, and a VH CDR3 having an amino acid sequence of a VH CDR1, a VH CDR2, and a VH CDR3, respectively, of a VH having an amino acid sequence of SEQ ID NO:21; and (ii) a VL comprising a VL CDR1, a VL CDR2, and a VL CDR3 having an amino acid sequence of a VL CDR1, a VL CDR2, and a VL CDR3, respectively, of a VL having an amino acid sequence of SEQ ID NO:25; and
[0307] (i) a VH comprising a VH CDR1, a VH CDR2, and a VH CDR3 having an amino acid sequence of a VH CDR1, a VH CDR2, and a VH CDR3, respectively, of a VH having an amino acid sequence of SEQ ID NO:29; and (ii) a VL comprising a VL CDR1, a VL CDR2, and a VL CDR3 having an amino acid sequence of a VL CDR1, a VL CDR2, and a VL CDR3, respectively, of a VL having an amino acid sequence of SEQ ID NO:33;
[0308] (i) a VH comprising a VH CDR1, a VH CDR2, and a VH CDR3 having an amino acid sequence of a VH CDR1, a VH CDR2, and a VH CDR3, respectively, of a VH having an amino acid sequence of SEQ ID NO:37; and (ii) a VL comprising a VL CDR1, a VL CDR2, and a VL CDR3 having an amino acid sequence of a VL CDR1, a VL CDR2, and a VL CDR3, respectively, of a VL having an amino acid sequence of SEQ ID NO:33;
[0309] (i) a VH comprising a VH CDR1, a VH CDR2, and a VH CDR3 having an amino acid sequence of a VH CDR1, a VH CDR2, and a VH CDR3, respectively, of a VH having an amino acid sequence of SEQ ID NO:29; and (ii) a VL comprising a VL CDR1, a VL CDR2, and a VL CDR3 having an amino acid sequence of a VL CDR1, a VL CDR2, and a VL CDR3, respectively, of a VL having an amino acid sequence of SEQ ID NO:20;
[0310] (i) a VH comprising a VH CDR1, a VH CDR2, and a VH CDR3 having an amino acid sequence of a VH CDR1, a VH CDR2, and a VH CDR3, respectively, of a VH having an amino acid sequence of SEQ ID NO:37; and (ii) a VL comprising a VL CDR1, a VL CDR2, and a VL CDR3 having an amino acid sequence of a VL CDR1, a VL CDR2, and a VL CDR3, respectively, of a VL having an amino acid sequence of SEQ ID NO:20 (FIGS. 24-26).

[0311] In certain embodiments, the variant PD-L1 ABD is capable of binding PD-L1 antigen, as measured by at least one of a Biacore, surface plasmon resonance (SPR) and/or BLI (biolayer interferometry, e.g., Octet assay) assay, with the latter finding particular use in many embodiments. In particular embodiments, the PD-L1 ABD is capable of binding to human and cynomolgus PD-L1.

[0312] In one embodiment, the anti-PD-L1 ABD includes 6 CDRs that are at least 90, 95, 97, 98 or 99% identical to the 6 CDRs of an anti-PD-L1 ABD as described herein, including FIGS. 24-26, and the Sequence Listing. In exemplary embodiments, the anti-PD-L1 ABD includes 6 CDRs that are at least 90, 95, 97, 98 or 99% identical to the 6 CDRs of an PD-L1 ABD comprising a variable heavy domain (VH) and a variable light domain (VL) selected from the following:
[0313] (i) a VH comprising a VH CDR1, a VH CDR2, and a VH CDR3 having an amino acid sequence of a VH CDR1, a VH CDR2, and a VH CDR3, respectively, of a VH having an amino acid sequence of SEQ ID NO:21; and (ii) a VL comprising a VL CDR1, a VL CDR2, and a VL CDR3 having an amino acid sequence of a VL CDR1, a VL CDR2, and a VL CDR3, respectively, of a VL having an amino acid sequence of SEQ ID NO:25; and
[0314] (i) a VH comprising a VH CDR1, a VH CDR2, and a VH CDR3 having an amino acid sequence of a VH CDR1, a VH CDR2, and a VH CDR3, respectively, of a VH having an amino acid sequence of SEQ ID NO:29; and (ii) a VL comprising a VL CDR1, a VL CDR2, and a VL CDR3 having an amino acid sequence of a VL CDR1, a VL CDR2, and a VL CDR3, respectively, of a VL having an amino acid sequence of SEQ ID NO:33;
[0315] (i) a VH comprising a VH CDR1, a VH CDR2, and a VH CDR3 having an amino acid sequence of a VH CDR1, a VH CDR2, and a VH CDR3, respectively, of a VH having an amino acid sequence of SEQ ID NO:37; and (ii) a VL comprising a VL CDR1, a VL CDR2, and a VL CDR3 having an amino acid sequence of a VL CDR1, a VL CDR2, and a VL CDR3, respectively, of a VL having an amino acid sequence of SEQ ID NO:33;
[0316] (i) a VH comprising a VH CDR1, a VH CDR2, and a VH CDR3 having an amino acid sequence of a VH CDR1, a VH CDR2, and a VH CDR3, respectively, of a VH having an amino acid sequence of SEQ ID NO:29; and (ii) a VL comprising a VL CDR1, a VL CDR2, and a VL CDR3 having an amino acid sequence of a VL CDR1, a VL CDR2, and a VL CDR3, respectively, of a VL having an amino acid sequence of SEQ ID NO:20;
[0317] (i) a VH comprising a VH CDR1, a VH CDR2, and a VH CDR3 having an amino acid sequence of a VH CDR1, a VH CDR2, and a VH CDR3, respectively, of a VH having an amino acid sequence of SEQ ID NO:37; and (ii) a VL comprising a VL CDR1, a VL CDR2, and a VL CDR3 having an amino acid sequence of a VL CDR1, a VL CDR2, and a VL CDR3, respectively, of a VL having an amino acid sequence of SEQ ID NO:20 (FIGS. 24-26).

[0318] In certain embodiments, the anti-PD-L1 ABD is capable of binding to PD-L1 antigen, as measured by at least one of a Biacore, surface plasmon resonance (SPR) and/or BLI (biolayer interferometry, e.g., Octet assay) assay, with the latter finding particular use in many embodiments. In particular embodiments, the PD-L1 ABD is capable of binding to human and cynomolgus PD-L1.

[0319] In another exemplary embodiment, the anti-PD-L1 ABD include the variable heavy (VH) domain and/or variable light (VL) domain of any one of the PD-L1 ABDs described herein, including FIGS. 24-26 and the Sequence Listing. In exemplary embodiments, VH and VL are selected from the following:
[0320] (i) a VH having an amino acid sequence of SEQ ID NO:21; and (ii) a VL having an amino acid sequence of SEQ ID NO:25; and
[0321] (i) a VH having an amino acid sequence of SEQ ID NO:29; and (ii) a VL having an amino acid sequence of SEQ ID NO:33;
[0322] (i) a VH having an amino acid sequence of SEQ ID NO:37; and (ii) a VL having an amino acid sequence of SEQ ID NO:33;
[0323] (i) a VH having an amino acid sequence of SEQ ID NO:29; and (ii) a VL having an amino acid sequence of SEQ ID NO:20; and
[0324] (i) a VH having an amino acid sequence of SEQ ID NO:37; and (ii) a VL having an amino acid sequence of SEQ ID NO:20 (FIGS. 24-26).

[0325] In addition to the parental anti-PD-L1 binding domain variable heavy and variable light domains disclosed herein, provided herein are anti-PD-L1 ABDs that include a variable heavy domain and/or a variable light domain that are variants of an anti-PD-L1 ABD VH and VL domain disclosed herein. In one embodiment, the variant VH domain and/or VL domain has from 1, 2, 3, 4, 5, 6, 7, 8, 9 or 10 amino acid changes from a VH and/or VL domain of an anti-PD-L1 ABD described herein, including FIGS. 28-31 and the Sequence Listing. In exemplary embodiments, the variant VH domain and/or VL domain has from 1, 2, 3, 4, 5, 6, 7, 8, 9 or 10 amino acid changes from a VH and/or VL are selected from the following:
[0326] (i) a VH having an amino acid sequence of SEQ ID NO:21; and (ii) a VL having an amino acid sequence of SEQ ID NO:25; and
[0327] (i) a VH having an amino acid sequence of SEQ ID NO:29; and (ii) a VL having an amino acid sequence of SEQ ID NO:33;
[0328] (i) a VH having an amino acid sequence of SEQ ID NO:37; and (ii) a VL having an amino acid sequence of SEQ ID NO:33;
[0329] (i) a VH having an amino acid sequence of SEQ ID NO:29; and (ii) a VL having an amino acid sequence of SEQ ID NO:20; and
[0330] (i) a VH having an amino acid sequence of SEQ ID NO:37; and (ii) a VL having an amino acid sequence of SEQ ID NO:20 (FIGS. 24-26).

[0331] In certain embodiments, the anti-PD-L1 ABD is capable of binding to PD-L1, as measured at least one of a Biacore, surface plasmon resonance (SPR) and/or BLI (biolayer interferometry, e.g., Octet assay) assay, with the latter finding particular use in many embodiments. In particular embodiments, the PD-L1 ABD is capable of binding to human and cynomolgus PD-L1.

[0332] In some embodiments, the PD-L1 ABD includes a variable heavy domain that has from 1, 2, 3, 4, 5, 6, 7, 8, 9 or 10 amino acid changes one of the following PD-L1 ABD variable heavy domains: SEQ ID NOs:21, 29 and 37. In some embodiments, the PD-L1 ABD includes any of the variable light domains provided herein or a variant thereof.

[0333] In some embodiments, the PD-L1 ABD includes a variable light domain that has from 1, 2, 3, 4, 5, 6, 7, 8, 9 or 10 amino acid changes one of the following PD-L1 ABD variable light domains: SEQ ID NOs: 20, 25, and 33. In some embodiments, the PD-L1 ABD includes any of the variable heavy domains provided herein or a variant thereof.

[0334] In one embodiment, the variant VH and/or VL domain is at least 90, 95, 97, 98 or 99% identical to the VH and/or VL of an anti-PD-L1 ABD as described herein, including FIGS. 25 and 26, and the Sequence Listing. In exemplary embodiments, the variant VH and/or VL domain is at least 90, 95, 97, 98 or 99% identical to the VH and/or VL of one of an anti-PD-L1 ABD comprising a VH and VL selected from the following:
[0335] (i) a VH having an amino acid sequence of SEQ ID NO:21; and (ii) a VL having an amino acid sequence of SEQ ID NO:25; and
[0336] (i) a VH having an amino acid sequence of SEQ ID NO:29; and (ii) a VL having an amino acid sequence of SEQ ID NO:33;
[0337] (i) a VH having an amino acid sequence of SEQ ID NO:37; and (ii) a VL having an amino acid sequence of SEQ ID NO:33;
[0338] (i) a VH having an amino acid sequence of SEQ ID NO:29; and (ii) a VL having an amino acid sequence of SEQ ID NO:20; and
[0339] (i) a VH having an amino acid sequence of SEQ ID NO:37; and (ii) a VL having an amino acid sequence of SEQ ID NO:20 (FIGS. 24-26).

[0340] In certain embodiments, the anti-PD-L1 ABD is capable of binding to PD-L1, as measured by at least one of a Biacore, surface plasmon resonance (SPR) and/or BLI (biolayer interferometry, e.g., Octet assay) assay, with the latter finding particular use in many embodiments. In particular embodiments, the PD-L1 ABD is capable of binding to human and cynomolgus PD-L1.

[0341] In some embodiments, the PD-L1 ABD includes a variable heavy domain that is at least 90, 95, 97, 98 or 99% identical to one of the following PD-L1 ABD variable heavy domains: SEQ ID NOs:21, 29 and 37. In some embodiments, the PD-L1 ABD includes any of the variable light domains provided herein or a variant thereof.

[0342] In some embodiments, the PD-L1 ABD includes a variable light domain that is at least 90, 95, 97, 98 or 99% identical to one of the following PD-L1 ABD variable light domains: SEQ ID NOs: 20, 25, and 33. In some embodiments, the PD-L1 ABD includes any of the variable heavy domains provided herein or a variant thereof.

[0343] In some embodiments, the PD-L1 ABDs have variable heavy and variable light domains that are 90, 95, 97, 98 or 99% identical to the VH and/or VL domains of a PD-L1 ABD as described herein, but the CDRs are identical. In some embodiments, the VH selected from the group consisting of: SEQ ID NOs:21, 29 and 37. In some embodiments, the VL is selected from the group consisting of: SEQ ID NOs: 20, 25, and 33.

[0344] In some embodiments, the PD-L1 ABDs have variable heavy and variable light domains that are 90, 95, 97, 98 or 99% identical to the VH and/or VL domains of a PD-L1 ABD as described herein, and there can be from 0 to 6 amino acid modifications in the CDRs. In some embodiments, the VH selected from the group consisting of: SEQ ID NOs:21, 29 and 37. In some embodiments, the VL is selected from the group consisting of: SEQ ID NOs: 20, 25, and 33.

[0345] In some embodiments, the PD-L1 ABDs have variable heavy and variable light domains that are 90, 95, 97, 98 or 99% identical to the VH and/or VL domains of a PD-L1 ABD as described herein, and there can be from 0 to 6 amino acid modifications in the CDRs, with no CDR having more than 1 amino acid modification. In some embodiments, the VH selected from the group consisting of: SEQ ID NOs:21, 29 and 37. In some embodiments, the VL is selected from the group consisting of: SEQ ID NOs: 20, 25, and 33.

[0346] In certain embodiments, the PD-L1 ABD is capable of binding to the PD-L1, as measured by at least one of a Biacore, surface plasmon resonance (SPR) and/or BLI (biolayer interferometry, e.g., Octet assay) assay, with the latter finding particular use in many embodiments. In particular embodiments, the CD28 ABD is capable of binding human PD-L1 (see FIG. 2) at detectable limits of the assay.

[0347] Such PD-L1 binding domains can be included in any of the antibodies provided herein including, for example, the bispecific and trispecific antibody formats provided in FIGS. 82 and 83.

[0348] 1. Additional PD-L1 Binding Domains

[0349] In another aspect, provided herein are additional PD-L1 binding domains that can be used in anti-PD-L1 antibodies, including any of the anti-PD-L1 antibodies described herein. In some embodiments, the anti-PD-L1 binding domain includes a variable heavy domain is selected from any of those in FIG. 161 (SEQ ID NOs:3335, and 3243-3260) or a variant thereof, and a common light chain with a variable light domain referred to as “IGKV1-39_L1” (also referred to as, “2A3A4.248[PDL1]_L1” (SEQ ID NO:3239, see FIG. 161A) and “1F12A4.249[PDL2]_L1” (SEQ ID NO:3271, see FIG. 162A)) or variant thereof, wherein the common light chain can also be used as a light chain for a CD28 and/or PD-L2 binding domain. In some embodiments, the anti-PD-L1 antibodies provided herein (e.g., anti-CD28×anti-PD-L1, and anti-CD28×anti-PD-L1×anti-PDL2 antibodies) includes a PD-L1 binding domain that includes a common light chain with the IGKV1-39_L1 variable light domain. In some embodiments, the anti-PD-L1 antibody is an anti-CD28×anti-PD-L1 antibody having a CD28 binding domain and a PD-L1 binding domain that each include a common light chain with the IGKV1-39_L1 variable light domain (SEQ ID NO:3239). In some embodiments, the anti-PD-L1 antibody is an anti-CD28×anti-PD-L1×anti-PD-L2 antibody having a CD28 binding domain, a PD-L1 binding domain, and a PD-L2 binding domain that each include a common light chain with the IGKV1-39_L1 variable light domain (SEQ ID NO:3239). Such PD-L1 binding domains that utilize a common light chain with the IGKV1-39_L1 variable light domain (SEQ ID NO:3239) can be used, for example, in any of the antibody formats provided herein that utilize a common light chain (see, e.g., 1+1 CLC, 2+1 CLC, 1+1+1 stackFab2-scFv-Fc, 1+1+1 Fab-(Fab-scFv)-Fc, 1+1+1 mAb-scFv, and 1+1+1 stackFab2-Fab-Fc formats disclosed herein, FIGS. 82 and 83).

[0350] In one embodiment, the PD-L1 antigen binding domain includes the vhCDR1-3 of any of the PD-L1 variable heavy domains depicted in FIG. 161 (SEQ ID NOs:3335, and 3243-3260), and the vlCDR1-3 of the IGK1-39_L1 variable light domain (SEQ ID NO:3239).

[0351] In one embodiment, the PD-L1 ABD of the subject anti-PD-L1 antibodies described herein includes a) a vhCDR1, vhCDR2, and/or vhCDR3 with 1, 2, 3, 4, 5, 6, 7, 8, 9, 10 amino acid modifications as compared to the vhCDR1, vhCDR2, and/or vhCDR3 of one of the PD-L1 variable heavy domains depicted in FIG. 161 (SEQ ID NOs:3335, and 3243-3260), respectively, and/or b) a vlCDR1, vlCDR2, and/or vlCDR3 with 1, 2, 3, 4, 5, 6, 7, 8, 9, 10 amino acid modifications as compared to the vlCDR1, vlCDR2, and/or vlCDR3 of the IGK1-39_L1 variable light domain (SEQ ID NO:3239), respectively. In certain embodiments, the PD-L1 ABD of the subject anti-PD-L1 antibody is capable of binding PD-L1 antigen, as measured by at least one of a Biacore, surface plasmon resonance (SPR), flow cytometry, and/or BLI (biolayer interferometry, e.g., Octet assay) assay, with the latter finding particular use in many embodiments. In particular embodiments, the PD-L1 ABD is capable of binding human PD-L1 antigen (see FIG. 1).

[0352] In one embodiment, the PD-L1 ABD of the subject anti-PD-L1 antibody includes a vhCDR1, vhCDR2, and/or vhCDR3 that is at least 90, 95, 97, 98 or 99% identical to the vhCDR1, vhCDR2, and/or vhCDR3 of one of the PD-L1 variable heavy domains depicted in FIG. 161 (SEQ ID NOs:3335, and 3243-3260), respectively, and/or a vlCDR1, vlCDR2, and/or vlCDR3 that is at least 90, 95, 97, 98 or 99% identical to the vlCDR1, vlCDR2, and/or vlCDR3 of the IGK1-39_L1 variable light domain (SEQ ID NO:3239), respectively. In certain embodiments, the PD-L1 ABD is capable of binding to the PD-L1, as measured by at least one of a Biacore, surface plasmon resonance (SPR), flow cytometry, and/or BLI (biolayer interferometry, e.g., Octet assay) assay, with the latter finding particular use in many embodiments. In particular embodiments, the PD-L1 ABD is capable of binding human PD-L1 antigen (see FIG. 1).

[0353] In another exemplary embodiment, the PD-L1 ABD of the subject anti-PD-L1 antibody includes the variable heavy (VH) domain of one of the PD-L1 variable heavy domains depicted in FIG. 161 (SEQ ID NOs:3335, and 3243-3260), and the IGK1-39_L1 variable light domain (SEQ ID NO:3239).

[0354] In some embodiments, the anti-PD-L1 antibody includes a PD-L1 ABD that includes a variable heavy domain that is a variant of one of the PD-L1 variable heavy domains depicted in FIG. 161 (SEQ ID NOs:3335, and 3243-3260), and/or a variable light domain that is a variant of the IGK1-39_L1 variable light domain (SEQ ID NO:3239). In some embodiments, the variant VH domain has from 1, 2, 3, 4, 5, 6, 7, 8, 9 or 10 amino acid changes compared to one of the PD-L1 variable heavy domains depicted in FIG. 161 (SEQ ID NOs:3335, and 3243-3260) and/or the variable light domain has from 1, 2, 3, 4, 5, 6, 7, 8, 9 or 10 amino acid changes from the IGK1-39_L1 variable light domain (SEQ ID NO:3239). In some embodiments, the one or more amino acid changes are in the VH and/or VL framework regions (FR1, FR2, FR3, and/or FR4). In some embodiments, the one or more amino acid change(s) are in one or more CDRs. In certain embodiments, the PD-L1 ABD is capable of binding to PD-L1, as measured by at least one of a Biacore, surface plasmon resonance (SPR), flow cytometry, and/or BLI (biolayer interferometry, e.g., Octet assay) assay, with the latter finding particular use in many embodiments. In particular embodiments, the PD-L1 ABD is capable of binding human PD-L1 antigen (see FIG. 1).

[0355] In one embodiment, the variant VH domain is at least 90, 95, 97, 98 or 99% identical to one of the PD-L1 variable heavy domains depicted in FIG. 161 (SEQ ID NOs:3335, and 3243-3260) and/or the variable light domain is at least 90, 95, 97, 98 or 99% identical to the IGK1-39_L1 variable light domain (SEQ ID NO:3239). In certain embodiments, the PD-L1 ABD is capable of binding to PD-L1, as measured by at least one of a Biacore, surface plasmon resonance (SPR), flow cytometry, and/or BLI (biolayer interferometry, e.g., Octet assay) assay, with the latter finding particular use in many embodiments. In particular embodiments, the PD-L1 ABD is capable of binding human PD-L1 antigen (see FIG. 1).

[0356] In some embodiments, the PD-L1 binding domain includes a VH that includes any one of the VHCDR1-3 and/or HFR1-4 sequences depicted in FIG. 161C and the IGK1-39_L1 variable light domain (SEQ ID NO:3239) or a variant thereof.

[0357] In another aspect, provided herein is a PD-L1 binding domain that competes with any of the PD-L1 binding domains disclosed herein for binding to human PD-L1.

### B. PD-L2 Antigen Binding Domains

[0358] In one aspect, provided herein are PD-L2 antigen binding domains (ABDs) and compositions that include such PD-L2 antigen binding domains (ABDs), including anti-PD-L2 antibodies (e.g., anti-PD-L1×anti-CD28 bispecific antibodies, and anti-PD-L1×anti-PD-L2×anti-CD28 trispecific antibodies). Such PD-L2 binding domains and related antibodies (e.g., bispecific and trispecific antibodies disclosed herein) find use, for example, in the treatment of PD-L2 associated cancers. In some embodiments, the PD-L2 ABDs are capable of binding to human and cynomolgus PD-L2 (see FIG. 2 and Example 1).

[0359] As will be appreciated by those in the art, suitable PD-L2 binding domains can comprise a set of 6 CDRs as depicted in FIGS. 29-32 and the Sequence Listing. Suitable PD-L2 ABDs can also include the entire VH and VL sequences as depicted in these sequences and FIGS. 29-32, and the Sequence Listing, used as scFvs or as Fab domains.

[0360] In one embodiment, the PD-L2 antigen binding domain includes the 6 CDRs (i.e., vhCDR1-3 and vlCDR1-3) of a PD-L2 ABD described herein, including FIGS. 29-32, and the Sequence Listing, either as the CDRs are underlined or, in the case where a different numbering scheme is used as described herein and as shown in Table 2, as the CDRs that are identified using other alignments within the variable heavy (VH) domain and variable light domain (VL) sequences of those depicted in FIGS. 29-32, and the Sequence Listing (see Table 2). Suitable PD-L2 ABDs can also include the entire VH and VL sequences as depicted in these sequences and figures, used as scFvs or as Fab domains.

[0361] In one embodiment, the PD-L2 antigen binding domain includes the 6 CDRs (i.e., vhCDR1-3 and vlCDR1-3) of an PD-L2 ABD described herein, including FIGS. 29-32, and the Sequence Listing. In exemplary embodiments, the PD-L2 antigen binding domain comprises the 6 CDRs of a PD-L2 comprising a variable heavy domain (VH) and a variable light domain (VL), wherein VH and VL selected from the following:
[0362] ((i) a VH comprising a VH CDR1, a VH CDR2, and a VH CDR3 having an amino acid sequence of a VH CDR1, a VH CDR2, and a VH CDR3, respectively, of a VH having an amino acid sequence of SEQ ID NO:41; and (ii) a VL comprising a VL CDR1, a VL CDR2, and a VL CDR3 having an amino acid sequence of a VL CDR1, a VL CDR2, and a VL CDR3, respectively, of a VL having an amino acid sequence of SEQ ID NO:45;
[0363] (i) a VH comprising a VH CDR1, a VH CDR2, and a VH CDR3 having an amino acid sequence of a VH CDR1, a VH CDR2, and a VH CDR3, respectively, of a VH having an amino acid sequence of SEQ ID NO:49; and (ii) a VL comprising a VL CDR1, a VL CDR2, and a VL CDR3 having an amino acid sequence of a VL CDR1, a VL CDR2, and a VL CDR3, respectively, of a VL having an amino acid sequence of SEQ ID NO:45;
[0364] (i) a VH comprising a VH CDR1, a VH CDR2, and a VH CDR3 having an amino acid sequence of a VH CDR1, a VH CDR2, and a VH CDR3, respectively, of a VH having an amino acid sequence of SEQ ID NO:41; and (ii) a VL comprising a VL CDR1, a VL CDR2, and a VL CDR3 having an amino acid sequence of a VL CDR1, a VL CDR2, and a VL CDR3, respectively, of a VL having an amino acid sequence of SEQ ID NO:20;
[0365] (i) a VH comprising a VH CDR1, a VH CDR2, and a VH CDR3 having an amino acid sequence of a VH CDR1, a VH CDR2, and a VH CDR3, respectively, of a VH having an amino acid sequence of SEQ ID NO:49; and (ii) a VL comprising a VL CDR1, a VL CDR2, and a VL CDR3 having an amino acid sequence of a VL CDR1, a VL CDR2, and a VL CDR3, respectively, of a VL having an amino acid sequence of SEQ ID NO:20;
[0366] (i) a VH comprising a VH CDR1, a VH CDR2, and a VH CDR3 having an amino acid sequence of a VH CDR1, a VH CDR2, and a VH CDR3, respectively, of a VH having an amino acid sequence of SEQ ID NO:53; and (ii) a VL comprising a VL CDR1, a VL CDR2, and a VL CDR3 having an amino acid sequence of a VL CDR1, a VL CDR2, and a VL CDR3, respectively, of a VL having an amino acid sequence of SEQ ID NO:57;
[0367] (i) a VH comprising a VH CDR1, a VH CDR2, and a VH CDR3 having an amino acid sequence of a VH CDR1, a VH CDR2, and a VH CDR3, respectively, of a VH having an amino acid sequence of SEQ ID NO:61; and (ii) a VL comprising a VL CDR1, a VL CDR2, and a VL CDR3 having an amino acid sequence of a VL CDR1, a VL CDR2, and a VL CDR3, respectively, of a VL having an amino acid sequence of SEQ ID NO:57;
[0368] (i) a VH comprising a VH CDR1, a VH CDR2, and a VH CDR3 having an amino acid sequence of a VH CDR1, a VH CDR2, and a VH CDR3, respectively, of a VH having an amino acid sequence of SEQ ID NO:53; and (ii) a VL comprising a VL CDR1, a VL CDR2, and a VL CDR3 having an amino acid sequence of a VL CDR1, a VL CDR2, and a VL CDR3, respectively, of a VL having an amino acid sequence of SEQ ID NO:20;
[0369] (i) a VH comprising a VH CDR1, a VH CDR2, and a VH CDR3 having an amino acid sequence of a VH CDR1, a VH CDR2, and a VH CDR3, respectively, of a VH having an amino acid sequence of SEQ ID NO:61; and (ii) a VL comprising a VL CDR1, a VL CDR2, and a VL CDR3 having an amino acid sequence of a VL CDR1, a VL CDR2, and a VL CDR3, respectively, of a VL having an amino acid sequence of SEQ ID NO:20;
[0370] (i) a VH comprising a VH CDR1, a VH CDR2, and a VH CDR3 having an amino acid sequence of a VH CDR1, a VH CDR2, and a VH CDR3, respectively, of a VH having an amino acid sequence of SEQ ID NO:65; and (ii) a VL comprising a VL CDR1, a VL CDR2, and a VL CDR3 having an amino acid sequence of a VL CDR1, a VL CDR2, and a VL CDR3, respectively, of a VL having an amino acid sequence of SEQ ID NO:69;
[0371] (i) a VH comprising a VH CDR1, a VH CDR2, and a VH CDR3 having an amino acid sequence of a VH CDR1, a VH CDR2, and a VH CDR3, respectively, of a VH having an amino acid sequence of SEQ ID NO:73; and (ii) a VL comprising a VL CDR1, a VL CDR2, and a VL CDR3 having an amino acid sequence of a VL CDR1, a VL CDR2, and a VL CDR3, respectively, of a VL having an amino acid sequence of SEQ ID NO:69;
[0372] (i) a VH comprising a VH CDR1, a VH CDR2, and a VH CDR3 having an amino acid sequence of a VH CDR1, a VH CDR2, and a VH CDR3, respectively, of a VH having an amino acid sequence of SEQ ID NO:65; and (ii) a VL comprising a VL CDR1, a VL CDR2, and a VL CDR3 having an amino acid sequence of a VL CDR1, a VL CDR2, and a VL CDR3, respectively, of a VL having an amino acid sequence of SEQ ID NO:20;
[0373] (i) a VH comprising a VH CDR1, a VH CDR2, and a VH CDR3 having an amino acid sequence of a VH CDR1, a VH CDR2, and a VH CDR3, respectively, of a VH having an amino acid sequence of SEQ ID NO:73; and (ii) a VL comprising a VL CDR1, a VL CDR2, and a VL CDR3 having an amino acid sequence of a VL CDR1, a VL CDR2, and a VL CDR3, respectively, of a VL having an amino acid sequence of SEQ ID NO:20;
[0374] (i) a VH comprising a VH CDR1, a VH CDR2, and a VH CDR3 having an amino acid sequence of a VH CDR1, a VH CDR2, and a VH CDR3, respectively, of a VH having an amino acid sequence of SEQ ID NO:77; and (ii) a VL comprising a VL CDR1, a VL CDR2, and a VL CDR3 having an amino acid sequence of a VL CDR1, a VL CDR2, and a VL CDR3, respectively, of a VL having an amino acid sequence of SEQ ID NO:81;
[0375] (i) a VH comprising a VH CDR1, a VH CDR2, and a VH CDR3 having an amino acid sequence of a VH CDR1, a VH CDR2, and a VH CDR3, respectively, of a VH having an amino acid sequence of SEQ ID NO:85; and (ii) a VL comprising a VL CDR1, a VL CDR2, and a VL CDR3 having an amino acid sequence of a VL CDR1, a VL CDR2, and a VL CDR3, respectively, of a VL having an amino acid sequence of SEQ ID NO:81;
[0376] (i) a VH comprising a VH CDR1, a VH CDR2, and a VH CDR3 having an amino acid sequence of a VH CDR1, a VH CDR2, and a VH CDR3, respectively, of a VH having an amino acid sequence of SEQ ID NO:77; and (ii) a VL comprising a VL CDR1, a VL CDR2, and a VL CDR3 having an amino acid sequence of a VL CDR1, a VL CDR2, and a VL CDR3, respectively, of a VL having an amino acid sequence of SEQ ID NO:20; and
[0377] (i) a VH having an amino acid sequence of SEQ ID NO:85; and (ii) a VL comprising a VL CDR1, a VL CDR2, and a VL CDR3 having an amino acid sequence of a VL CDR1, a VL CDR2, and a VL CDR3, respectively, of a VL having an amino acid sequence of SEQ ID NO:20 (FIG. 29-32). (FIGS. 24, and 29-32).

[0378] In addition to the parental CDR sets disclosed in the figures and sequence listing that form an ABD to PD-L2, provided herein are variant PD-L2 ABDS having CDRs that include at least one modification of the PD-L2 ABD CDRs disclosed herein. In one embodiment, the PD-L2 ABD includes a set of 6 CDRs with 1, 2, 3, 4, 5, 6, 7, 8, 9, 10 amino acid modifications as compared to the 6 CDRs of an PD-L2 ABD described herein, including the figures and sequence listing. In exemplary embodiments, the PD-L2 ABD includes a set of 6 CDRs with 1, 2, 3, 4, 5, 6, 7, 8, 9, 10 amino acid modifications as compared to the 6 CDRs of an PD-L2 ABD comprising a variable heavy domain (VH) and a variable light domain (VL) selected from the following:
[0379] ((i) a VH comprising a VH CDR1, a VH CDR2, and a VH CDR3 having an amino acid sequence of a VH CDR1, a VH CDR2, and a VH CDR3, respectively, of a VH having an amino acid sequence of SEQ ID NO:41; and (ii) a VL comprising a VL CDR1, a VL CDR2, and a VL CDR3 having an amino acid sequence of a VL CDR1, a VL CDR2, and a VL CDR3, respectively, of a VL having an amino acid sequence of SEQ ID NO:45;
[0380] (i) a VH comprising a VH CDR1, a VH CDR2, and a VH CDR3 having an amino acid sequence of a VH CDR1, a VH CDR2, and a VH CDR3, respectively, of a VH having an amino acid sequence of SEQ ID NO:49; and (ii) a VL comprising a VL CDR1, a VL CDR2, and a VL CDR3 having an amino acid sequence of a VL CDR1, a VL CDR2, and a VL CDR3, respectively, of a VL having an amino acid sequence of SEQ ID NO:45;
[0381] (i) a VH comprising a VH CDR1, a VH CDR2, and a VH CDR3 having an amino acid sequence of a VH CDR1, a VH CDR2, and a VH CDR3, respectively, of a VH having an amino acid sequence of SEQ ID NO:41; and (ii) a VL comprising a VL CDR1, a VL CDR2, and a VL CDR3 having an amino acid sequence of a VL CDR1, a VL CDR2, and a VL CDR3, respectively, of a VL having an amino acid sequence of SEQ ID NO:20;
[0382] (i) a VH comprising a VH CDR1, a VH CDR2, and a VH CDR3 having an amino acid sequence of a VH CDR1, a VH CDR2, and a VH CDR3, respectively, of a VH having an amino acid sequence of SEQ ID NO:49; and (ii) a VL comprising a VL CDR1, a VL CDR2, and a VL CDR3 having an amino acid sequence of a VL CDR1, a VL CDR2, and a VL CDR3, respectively, of a VL having an amino acid sequence of SEQ ID NO:20;
[0383] (i) a VH comprising a VH CDR1, a VH CDR2, and a VH CDR3 having an amino acid sequence of a VH CDR1, a VH CDR2, and a VH CDR3, respectively, of a VH having an amino acid sequence of SEQ ID NO:53; and (ii) a VL comprising a VL CDR1, a VL CDR2, and a VL CDR3 having an amino acid sequence of a VL CDR1, a VL CDR2, and a VL CDR3, respectively, of a VL having an amino acid sequence of SEQ ID NO:57;
[0384] (i) a VH comprising a VH CDR1, a VH CDR2, and a VH CDR3 having an amino acid sequence of a VH CDR1, a VH CDR2, and a VH CDR3, respectively, of a VH having an amino acid sequence of SEQ ID NO:61; and (ii) a VL comprising a VL CDR1, a VL CDR2, and a VL CDR3 having an amino acid sequence of a VL CDR1, a VL CDR2, and a VL CDR3, respectively, of a VL having an amino acid sequence of SEQ ID NO:57;
[0385] (i) a VH comprising a VH CDR1, a VH CDR2, and a VH CDR3 having an amino acid sequence of a VH CDR1, a VH CDR2, and a VH CDR3, respectively, of a VH having an amino acid sequence of SEQ ID NO:53; and (ii) a VL comprising a VL CDR1, a VL CDR2, and a VL CDR3 having an amino acid sequence of a VL CDR1, a VL CDR2, and a VL CDR3, respectively, of a VL having an amino acid sequence of SEQ ID NO:20;
[0386] (i) a VH comprising a VH CDR1, a VH CDR2, and a VH CDR3 having an amino acid sequence of a VH CDR1, a VH CDR2, and a VH CDR3, respectively, of a VH having an amino acid sequence of SEQ ID NO:61; and (ii) a VL comprising a VL CDR1, a VL CDR2, and a VL CDR3 having an amino acid sequence of a VL CDR1, a VL CDR2, and a VL CDR3, respectively, of a VL having an amino acid sequence of SEQ ID NO:20;
[0387] (i) a VH comprising a VH CDR1, a VH CDR2, and a VH CDR3 having an amino acid sequence of a VH CDR1, a VH CDR2, and a VH CDR3, respectively, of a VH having an amino acid sequence of SEQ ID NO:65; and (ii) a VL comprising a VL CDR1, a VL CDR2, and a VL CDR3 having an amino acid sequence of a VL CDR1, a VL CDR2, and a VL CDR3, respectively, of a VL having an amino acid sequence of SEQ ID NO:69;
[0388] (i) a VH comprising a VH CDR1, a VH CDR2, and a VH CDR3 having an amino acid sequence of a VH CDR1, a VH CDR2, and a VH CDR3, respectively, of a VH having an amino acid sequence of SEQ ID NO:73; and (ii) a VL comprising a VL CDR1, a VL CDR2, and a VL CDR3 having an amino acid sequence of a VL CDR1, a VL CDR2, and a VL CDR3, respectively, of a VL having an amino acid sequence of SEQ ID NO:69;
[0389] (i) a VH comprising a VH CDR1, a VH CDR2, and a VH CDR3 having an amino acid sequence of a VH CDR1, a VH CDR2, and a VH CDR3, respectively, of a VH having an amino acid sequence of SEQ ID NO:65; and (ii) a VL comprising a VL CDR1, a VL CDR2, and a VL CDR3 having an amino acid sequence of a VL CDR1, a VL CDR2, and a VL CDR3, respectively, of a VL having an amino acid sequence of SEQ ID NO:20;
[0390] (i) a VH comprising a VH CDR1, a VH CDR2, and a VH CDR3 having an amino acid sequence of a VH CDR1, a VH CDR2, and a VH CDR3, respectively, of a VH having an amino acid sequence of SEQ ID NO:73; and (ii) a VL comprising a VL CDR1, a VL CDR2, and a VL CDR3 having an amino acid sequence of a VL CDR1, a VL CDR2, and a VL CDR3, respectively, of a VL having an amino acid sequence of SEQ ID NO:20;
[0391] (i) a VH comprising a VH CDR1, a VH CDR2, and a VH CDR3 having an amino acid sequence of a VH CDR1, a VH CDR2, and a VH CDR3, respectively, of a VH having an amino acid sequence of SEQ ID NO:77; and (ii) a VL comprising a VL CDR1, a VL CDR2, and a VL CDR3 having an amino acid sequence of a VL CDR1, a VL CDR2, and a VL CDR3, respectively, of a VL having an amino acid sequence of SEQ ID NO:81;
[0392] (i) a VH comprising a VH CDR1, a VH CDR2, and a VH CDR3 having an amino acid sequence of a VH CDR1, a VH CDR2, and a VH CDR3, respectively, of a VH having an amino acid sequence of SEQ ID NO:85; and (ii) a VL comprising a VL CDR1, a VL CDR2, and a VL CDR3 having an amino acid sequence of a VL CDR1, a VL CDR2, and a VL CDR3, respectively, of a VL having an amino acid sequence of SEQ ID NO:81;
[0393] (i) a VH comprising a VH CDR1, a VH CDR2, and a VH CDR3 having an amino acid sequence of a VH CDR1, a VH CDR2, and a VH CDR3, respectively, of a VH having an amino acid sequence of SEQ ID NO:77; and (ii) a VL comprising a VL CDR1, a VL CDR2, and a VL CDR3 having an amino acid sequence of a VL CDR1, a VL CDR2, and a VL CDR3, respectively, of a VL having an amino acid sequence of SEQ ID NO:20; and
[0394] (i) a VH having an amino acid sequence of SEQ ID NO:85; and (ii) a VL comprising a VL CDR1, a VL CDR2, and a VL CDR3 having an amino acid sequence of a VL CDR1, a VL CDR2, and a VL CDR3, respectively, of a VL having an amino acid sequence of SEQ ID NO:20 (FIG. 29-32). (FIGS. 24, and 29-32).

[0395] In certain embodiments, the variant PD-L2 ABD is capable of binding PD-L2 antigen, as measured by at least one of a Biacore, surface plasmon resonance (SPR) and/or BLI (biolayer interferometry, e.g., Octet assay) assay, with the latter finding particular use in many embodiments. In particular embodiments, the PD-L2 ABD is capable of binding to human and cynomolgus PD-L2.

[0396] In one embodiment, the anti-PD-L2 ABD includes 6 CDRs that are at least 90, 95, 97, 98 or 99% identical to the 6 CDRs of an anti-PD-L2 ABD as described herein, including FIGS. 24, and 29-32, and the Sequence Listing. In exemplary embodiments, the anti-PD-L2 ABD includes 6 CDRs that are at least 90, 95, 97, 98 or 99% identical to the 6 CDRs of an PD-L2 ABD comprising a variable heavy domain (VH) and a variable light domain (VL) selected from the following:
[0397] (i) a VH comprising a VH CDR1, a VH CDR2, and a VH CDR3 having an amino acid sequence of a VH CDR1, a VH CDR2, and a VH CDR3, respectively, of a VH having an amino acid sequence of SEQ ID NO:41; and (ii) a VL comprising a VL CDR1, a VL CDR2, and a VL CDR3 having an amino acid sequence of a VL CDR1, a VL CDR2, and a VL CDR3, respectively, of a VL having an amino acid sequence of SEQ ID NO:45;
[0398] (i) a VH comprising a VH CDR1, a VH CDR2, and a VH CDR3 having an amino acid sequence of a VH CDR1, a VH CDR2, and a VH CDR3, respectively, of a VH having an amino acid sequence of SEQ ID NO:49; and (ii) a VL comprising a VL CDR1, a VL CDR2, and a VL CDR3 having an amino acid sequence of a VL CDR1, a VL CDR2, and a VL CDR3, respectively, of a VL having an amino acid sequence of SEQ ID NO:45;
[0399] (i) a VH comprising a VH CDR1, a VH CDR2, and a VH CDR3 having an amino acid sequence of a VH CDR1, a VH CDR2, and a VH CDR3, respectively, of a VH having an amino acid sequence of SEQ ID NO:41; and (ii) a VL comprising a VL CDR1, a VL CDR2, and a VL CDR3 having an amino acid sequence of a VL CDR1, a VL CDR2, and a VL CDR3, respectively, of a VL having an amino acid sequence of SEQ ID NO:20;
[0400] (i) a VH comprising a VH CDR1, a VH CDR2, and a VH CDR3 having an amino acid sequence of a VH CDR1, a VH CDR2, and a VH CDR3, respectively, of a VH having an amino acid sequence of SEQ ID NO:49; and (ii) a VL comprising a VL CDR1, a VL CDR2, and a VL CDR3 having an amino acid sequence of a VL CDR1, a VL CDR2, and a VL CDR3, respectively, of a VL having an amino acid sequence of SEQ ID NO:20;
[0401] (i) a VH comprising a VH CDR1, a VH CDR2, and a VH CDR3 having an amino acid sequence of a VH CDR1, a VH CDR2, and a VH CDR3, respectively, of a VH having an amino acid sequence of SEQ ID NO:53; and (ii) a VL comprising a VL CDR1, a VL CDR2, and a VL CDR3 having an amino acid sequence of a VL CDR1, a VL CDR2, and a VL CDR3, respectively, of a VL having an amino acid sequence of SEQ ID NO:57;
[0402] (i) a VH comprising a VH CDR1, a VH CDR2, and a VH CDR3 having an amino acid sequence of a VH CDR1, a VH CDR2, and a VH CDR3, respectively, of a VH having an amino acid sequence of SEQ ID NO:61; and (ii) a VL comprising a VL CDR1, a VL CDR2, and a VL CDR3 having an amino acid sequence of a VL CDR1, a VL CDR2, and a VL CDR3, respectively, of a VL having an amino acid sequence of SEQ ID NO:57;
[0403] (i) a VH comprising a VH CDR1, a VH CDR2, and a VH CDR3 having an amino acid sequence of a VH CDR1, a VH CDR2, and a VH CDR3, respectively, of a VH having an amino acid sequence of SEQ ID NO:53; and (ii) a VL comprising a VL CDR1, a VL CDR2, and a VL CDR3 having an amino acid sequence of a VL CDR1, a VL CDR2, and a VL CDR3, respectively, of a VL having an amino acid sequence of SEQ ID NO:20;
[0404] (i) a VH comprising a VH CDR1, a VH CDR2, and a VH CDR3 having an amino acid sequence of a VH CDR1, a VH CDR2, and a VH CDR3, respectively, of a VH having an amino acid sequence of SEQ ID NO:61; and (ii) a VL comprising a VL CDR1, a VL CDR2, and a VL CDR3 having an amino acid sequence of a VL CDR1, a VL CDR2, and a VL CDR3, respectively, of a VL having an amino acid sequence of SEQ ID NO:20;
[0405] (i) a VH comprising a VH CDR1, a VH CDR2, and a VH CDR3 having an amino acid sequence of a VH CDR1, a VH CDR2, and a VH CDR3, respectively, of a VH having an amino acid sequence of SEQ ID NO:65; and (ii) a VL comprising a VL CDR1, a VL CDR2, and a VL CDR3 having an amino acid sequence of a VL CDR1, a VL CDR2, and a VL CDR3, respectively, of a VL having an amino acid sequence of SEQ ID NO:69;
[0406] (i) a VH comprising a VH CDR1, a VH CDR2, and a VH CDR3 having an amino acid sequence of a VH CDR1, a VH CDR2, and a VH CDR3, respectively, of a VH having an amino acid sequence of SEQ ID NO:73; and (ii) a VL comprising a VL CDR1, a VL CDR2, and a VL CDR3 having an amino acid sequence of a VL CDR1, a VL CDR2, and a VL CDR3, respectively, of a VL having an amino acid sequence of SEQ ID NO:69;
[0407] (i) a VH comprising a VH CDR1, a VH CDR2, and a VH CDR3 having an amino acid sequence of a VH CDR1, a VH CDR2, and a VH CDR3, respectively, of a VH having an amino acid sequence of SEQ ID NO:65; and (ii) a VL comprising a VL CDR1, a VL CDR2, and a VL CDR3 having an amino acid sequence of a VL CDR1, a VL CDR2, and a VL CDR3, respectively, of a VL having an amino acid sequence of SEQ ID NO:20;
[0408] (i) a VH comprising a VH CDR1, a VH CDR2, and a VH CDR3 having an amino acid sequence of a VH CDR1, a VH CDR2, and a VH CDR3, respectively, of a VH having an amino acid sequence of SEQ ID NO:73; and (ii) a VL comprising a VL CDR1, a VL CDR2, and a VL CDR3 having an amino acid sequence of a VL CDR1, a VL CDR2, and a VL CDR3, respectively, of a VL having an amino acid sequence of SEQ ID NO:20;
[0409] (i) a VH comprising a VH CDR1, a VH CDR2, and a VH CDR3 having an amino acid sequence of a VH CDR1, a VH CDR2, and a VH CDR3, respectively, of a VH having an amino acid sequence of SEQ ID NO:77; and (ii) a VL comprising a VL CDR1, a VL CDR2, and a VL CDR3 having an amino acid sequence of a VL CDR1, a VL CDR2, and a VL CDR3, respectively, of a VL having an amino acid sequence of SEQ ID NO:81;
[0410] (i) a VH comprising a VH CDR1, a VH CDR2, and a VH CDR3 having an amino acid sequence of a VH CDR1, a VH CDR2, and a VH CDR3, respectively, of a VH having an amino acid sequence of SEQ ID NO:85; and (ii) a VL comprising a VL CDR1, a VL CDR2, and a VL CDR3 having an amino acid sequence of a VL CDR1, a VL CDR2, and a VL CDR3, respectively, of a VL having an amino acid sequence of SEQ ID NO:81;
[0411] (i) a VH comprising a VH CDR1, a VH CDR2, and a VH CDR3 having an amino acid sequence of a VH CDR1, a VH CDR2, and a VH CDR3, respectively, of a VH having an amino acid sequence of SEQ ID NO:77; and (ii) a VL comprising a VL CDR1, a VL CDR2, and a VL CDR3 having an amino acid sequence of a VL CDR1, a VL CDR2, and a VL CDR3, respectively, of a VL having an amino acid sequence of SEQ ID NO:20; and
[0412] (i) a VH having an amino acid sequence of SEQ ID NO:85; and (ii) a VL comprising a VL CDR1, a VL CDR2, and a VL CDR3 having an amino acid sequence of a VL CDR1, a VL CDR2, and a VL CDR3, respectively, of a VL having an amino acid sequence of SEQ ID NO:20 (FIG. 29-32). (FIGS. 24, and 29-32).

[0413] In certain embodiments, the anti-PD-L2 ABD is capable of binding to PD-L2 antigen, as measured by at least one of a Biacore, surface plasmon resonance (SPR) and/or BLI (biolayer interferometry, e.g., Octet assay) assay, with the latter finding particular use in many embodiments. In particular embodiments, the PD-L2 ABD is capable of binding to human and cynomolgus PD-L2.

[0414] In another exemplary embodiment, the anti-PD-L2 ABD include the variable heavy (VH) domain and/or variable light (VL) domain of any one of the PD-L2 ABDs described herein, including FIGS. 24, and 29-32 and the Sequence Listing. In exemplary embodiments, VH and VL are selected from the following:
[0415] ((i) a VH having an amino acid sequence of SEQ ID NO:41; and (ii) a VL having an amino acid sequence of SEQ ID NO:45;
[0416] (i) a VH having an amino acid sequence of SEQ ID NO:49; and (ii) a VL having an amino acid sequence of SEQ ID NO:45;
[0417] (i) a VH having an amino acid sequence of SEQ ID NO:41; and (ii) a VL having an amino acid sequence of SEQ ID NO:20; and
[0418] (i) a VH having an amino acid sequence of SEQ ID NO:49; and (ii) a VL having an amino acid sequence of SEQ ID NO:20;
[0419] (i) a VH having an amino acid sequence of SEQ ID NO:53; and (ii) a VL having an amino acid sequence of SEQ ID NO:57;
[0420] (i) a VH having an amino acid sequence of SEQ ID NO:61; and (ii) a VL having an amino acid sequence of SEQ ID NO:57;
[0421] (i) a VH having an amino acid sequence of SEQ ID NO:53; and (ii) a VL having an amino acid sequence of SEQ ID NO:20;
[0422] (i) a VH having an amino acid sequence of SEQ ID NO:61; and (ii) a VL having an amino acid sequence of SEQ ID NO:20;
[0423] (i) a VH having an amino acid sequence of SEQ ID NO:65; and (ii) a VL having an amino acid sequence of SEQ ID NO:69;
[0424] (i) a VH having an amino acid sequence of SEQ ID NO:73; and (ii) a VL having an amino acid sequence of SEQ ID NO:69;
[0425] (i) a VH having an amino acid sequence of SEQ ID NO:65; and (ii) a VL having an amino acid sequence of SEQ ID NO:20;
[0426] (i) a VH having an amino acid sequence of SEQ ID NO:73; and (ii) a VL having an amino acid sequence of SEQ ID NO:20;
[0427] (i) a VH having an amino acid sequence of SEQ ID NO:77; and (ii) a VL having an amino acid sequence of SEQ ID NO:81;
[0428] (i) a VH having an amino acid sequence of SEQ ID NO:85; and (ii) a VL having an amino acid sequence of SEQ ID NO:81;
[0429] (i) a VH having an amino acid sequence of SEQ ID NO:77; and (ii) a VL having an amino acid sequence of SEQ ID NO:20; and
[0430] (i) a VH having an amino acid sequence of SEQ ID NO:85; and (ii) a VL having an amino acid sequence of SEQ ID NO:20 (FIGS. 24, and 29-32).

[0431] In addition to the parental anti-PD-L2 binding domain variable heavy and variable light domains disclosed herein, provided herein are anti-PD-L2 ABDs that include a variable heavy domain and/or a variable light domain that are variants of an anti-PD-L2 ABD VH and VL domain disclosed herein. In one embodiment, the variant VH domain and/or VL domain has from 1, 2, 3, 4, 5, 6, 7, 8, 9 or 10 amino acid changes from a VH and/or VL domain of an anti-PD-L2 ABD described herein, including FIGS. 28-31 and the Sequence Listing. In exemplary embodiments, the variant VH domain and/or VL domain has from 1, 2, 3, 4, 5, 6, 7, 8, 9 or 10 amino acid changes from a VH and/or VL are selected from the following:
[0432] (i) a VH having an amino acid sequence of SEQ ID NO:41; and (ii) a VL having an amino acid sequence of SEQ ID NO:45;
[0433] (i) a VH having an amino acid sequence of SEQ ID NO:49; and (ii) a VL having an amino acid sequence of SEQ ID NO:45;
[0434] (i) a VH having an amino acid sequence of SEQ ID NO:41; and (ii) a VL having an amino acid sequence of SEQ ID NO:20; and
[0435] (i) a VH having an amino acid sequence of SEQ ID NO:49; and (ii) a VL having an amino acid sequence of SEQ ID NO:20;
[0436] (i) a VH having an amino acid sequence of SEQ ID NO:53; and (ii) a VL having an amino acid sequence of SEQ ID NO:57;
[0437] (i) a VH having an amino acid sequence of SEQ ID NO:61; and (ii) a VL having an amino acid sequence of SEQ ID NO:57;
[0438] (i) a VH having an amino acid sequence of SEQ ID NO:53; and (ii) a VL having an amino acid sequence of SEQ ID NO:20;
[0439] (i) a VH having an amino acid sequence of SEQ ID NO:61; and (ii) a VL having an amino acid sequence of SEQ ID NO:20;
[0440] (i) a VH having an amino acid sequence of SEQ ID NO:65; and (ii) a VL having an amino acid sequence of SEQ ID NO:69;
[0441] (i) a VH having an amino acid sequence of SEQ ID NO:73; and (ii) a VL having an amino acid sequence of SEQ ID NO:69;
[0442] (i) a VH having an amino acid sequence of SEQ ID NO:65; and (ii) a VL having an amino acid sequence of SEQ ID NO:20;
[0443] (i) a VH having an amino acid sequence of SEQ ID NO:73; and (ii) a VL having an amino acid sequence of SEQ ID NO:20;
[0444] (i) a VH having an amino acid sequence of SEQ ID NO:77; and (ii) a VL having an amino acid sequence of SEQ ID NO:81;
[0445] (i) a VH having an amino acid sequence of SEQ ID NO:85; and (ii) a VL having an amino acid sequence of SEQ ID NO:81;
[0446] (i) a VH having an amino acid sequence of SEQ ID NO:77; and (ii) a VL having an amino acid sequence of SEQ ID NO:20; and
[0447] (i) a VH having an amino acid sequence of SEQ ID NO:85; and (ii) a VL having an amino acid sequence of SEQ ID NO:20 (FIGS. 24, and 29-32).

[0448] In certain embodiments, the anti-PD-L2 ABD is capable of binding to PD-L2, as measured at least one of a Biacore, surface plasmon resonance (SPR) and/or BLI (biolayer interferometry, e.g., Octet assay) assay, with the latter finding particular use in many embodiments. In particular embodiments, the PD-L2 ABD is capable of binding to human and cynomolgus PD-L2.

[0449] In some embodiments, the PD-L2 ABD includes a variable heavy domain that has from 1, 2, 3, 4, 5, 6, 7, 8, 9 or 10 amino acid changes one of the following PD-L2 ABD variable heavy domains: SEQ ID NOs:41, 49, 53, 61, 65, 73, 77 and 85. In some embodiments, the PD-L2 ABD includes any of the variable light domains provided herein or a variant thereof.

[0450] In some embodiments, the PD-L2 ABD includes a variable light domain that has from 1, 2, 3, 4, 5, 6, 7, 8, 9 or 10 amino acid changes one of the following PD-L2 ABD variable light domains: SEQ ID NOs: 20, 45, 57, 69, and 81. In some embodiments, the PD-L2 ABD includes any of the variable heavy domains provided herein or a variant thereof.

[0451] In one embodiment, the variant VH and/or VL domain is at least 90, 95, 97, 98 or 99% identical to the VH and/or VL of an anti-PD-L2 ABD as described herein, including FIGS. 29-32, and the Sequence Listing. In exemplary embodiments, the variant VH and/or VL domain is at least 90, 95, 97, 98 or 99% identical to the VH and/or VL of one of an anti-PD-L2 ABD comprising a VH and VL selected from the following:
[0452] ((i) a VH having an amino acid sequence of SEQ ID NO:41; and (ii) a VL having an amino acid sequence of SEQ ID NO:45;
[0453] (i) a VH having an amino acid sequence of SEQ ID NO:49; and (ii) a VL having an amino acid sequence of SEQ ID NO:45;
[0454] (i) a VH having an amino acid sequence of SEQ ID NO:41; and (ii) a VL having an amino acid sequence of SEQ ID NO:20; and
[0455] (i) a VH having an amino acid sequence of SEQ ID NO:49; and (ii) a VL having an amino acid sequence of SEQ ID NO:20;
[0456] (i) a VH having an amino acid sequence of SEQ ID NO:53; and (ii) a VL having an amino acid sequence of SEQ ID NO:57;
[0457] (i) a VH having an amino acid sequence of SEQ ID NO:61; and (ii) a VL having an amino acid sequence of SEQ ID NO:57;
[0458] (i) a VH having an amino acid sequence of SEQ ID NO:53; and (ii) a VL having an amino acid sequence of SEQ ID NO:20;
[0459] (i) a VH having an amino acid sequence of SEQ ID NO:61; and (ii) a VL having an amino acid sequence of SEQ ID NO:20;
[0460] (i) a VH having an amino acid sequence of SEQ ID NO:65; and (ii) a VL having an amino acid sequence of SEQ ID NO:69;
[0461] (i) a VH having an amino acid sequence of SEQ ID NO:73; and (ii) a VL having an amino acid sequence of SEQ ID NO:69;
[0462] (i) a VH having an amino acid sequence of SEQ ID NO:65; and (ii) a VL having an amino acid sequence of SEQ ID NO:20;
[0463] (i) a VH having an amino acid sequence of SEQ ID NO:73; and (ii) a VL having an amino acid sequence of SEQ ID NO:20;
[0464] (i) a VH having an amino acid sequence of SEQ ID NO:77; and (ii) a VL having an amino acid sequence of SEQ ID NO:81;
[0465] (i) a VH having an amino acid sequence of SEQ ID NO:85; and (ii) a VL having an amino acid sequence of SEQ ID NO:81;
[0466] (i) a VH having an amino acid sequence of SEQ ID NO:77; and (ii) a VL having an amino acid sequence of SEQ ID NO:20; and
[0467] (i) a VH having an amino acid sequence of SEQ ID NO:85; and (ii) a VL having an amino acid sequence of SEQ ID NO:20 (FIGS. 24, and 29-32).

[0468] In certain embodiments, the anti-PD-L2 ABD is capable of binding to PD-L2, as measured by at least one of a Biacore, surface plasmon resonance (SPR) and/or BLI (biolayer interferometry, e.g., Octet assay) assay, with the latter finding particular use in many embodiments. In particular embodiments, the PD-L2 ABD is capable of binding to human and cynomolgus PD-L2.

[0469] In some embodiments, the PD-L2 ABD includes a variable heavy domain that is at least 90, 95, 97, 98 or 99% identical to one of the following PD-L2 ABD variable heavy domains: SEQ ID NOs:41, 49, 53, 61, 65, 73, 77 and 85. In some embodiments, the PD-L2 ABD includes any of the variable light domains provided herein or a variant thereof.

[0470] In some embodiments, the PD-L2 ABD includes a variable light domain that is at least 90, 95, 97, 98 or 99% identical to one of the following PD-L2 ABD variable light domains: SEQ ID NOs: 20, 45, 57, 69, and 81. In some embodiments, the PD-L2 ABD includes any of the variable heavy domains provided herein or a variant thereof.

[0471] In some embodiments, the PD-L2 ABDs have variable heavy and variable light domains that are 90, 95, 97, 98 or 99% identical to the VH and/or VL domains of a PD-L2 ABD as described herein, but the CDRs are identical. In some embodiments, the VH selected from the group consisting of: SEQ ID NOs:41, 49, 53, 61, 65, 73, 77 and 85. In some embodiments, the VL is selected from the group consisting of: SEQ ID NOs: 20, 45, 57, 69, and 81.

[0472] In some embodiments, the PD-L2 ABDs have variable heavy and variable light domains that are 90, 95, 97, 98 or 99% identical to the VH and/or VL domains of a PD-L2 ABD as described herein, and there can be from 0 to 6 amino acid modifications in the CDRs. In some embodiments, the VH selected from the group consisting of: SEQ ID NOs:41, 49, 53, 61, 65, 73, 77 and 85. In some embodiments, the VL is selected from the group consisting of: SEQ ID NOs: 20, 45, 57, 69, and 81.

[0473] In some embodiments, the PD-L2 ABDs have variable heavy and variable light domains that are 90, 95, 97, 98 or 99% identical to the VH and/or VL domains of a PD-L2 ABD as described herein, and there can be from 0 to 6 amino acid modifications in the CDRs, with no CDR having more than 1 amino acid modification. In some embodiments, the VH selected from the group consisting of: SEQ ID NOs:41, 49, 53, 61, 65, 73, 77 and 85. In some embodiments, the VL is selected from the group consisting of: SEQ ID NOs: 20, 45, 57, 69, and 81.

[0474] In certain embodiments, the PD-L2 ABD is capable of binding to the PD-L2, as measured by at least one of a Biacore, surface plasmon resonance (SPR) and/or BLI (biolayer interferometry, e.g., Octet assay) assay, with the latter finding particular use in many embodiments. In particular embodiments, the CD28 ABD is capable of binding human PD-L2 (see FIG. 2) at detectable limits of the assay.

[0475] Such PD-L2 binding domains can be included in any of the antibodies provided herein including, for example, the bispecific and trispecific antibody formats provided in FIGS. 82 and 83.

[0476] 1. Additional PD-L2 Binding Domains

[0477] In another aspect, provided herein are additional PD-L2 binding domains that can be used in anti-PD-L2 antibodies, including any of the anti-PD-L1 antibodies described herein. In some embodiments, the anti-PD-L1 binding domain includes a variable heavy domain selected from any of those in FIG. 162 (SEQ ID NOs:3267, and 3275-3347) or a variant thereof, and a common light chain with a variable light domain referred to as “IGKV1-39_L1” (also referred to as, “2A3A4.248[PDL1]_L1” (SEQ ID NO:3239, see FIG. 161A) and “1F12A4.249[PDL2]_L1” (SEQ ID NO:3271, see FIG. 162A)) or variant thereof, wherein the common light chain can also be used as a light chain for a CD28 and/or PD-L1 binding domain. In some embodiments, the anti-PD-L1 antibodies provided herein (e.g., anti-CD28×anti-PD-L2, and anti-CD28×anti-PD-L1×anti-PDL2 antibodies) includes a PD-L2 binding domain that includes a common light chain with the IGKV1-39_L1 variable light domain. In some embodiments, the anti-PD-L2 antibody is an anti-CD28×anti-PD-L2 antibody having a CD28 binding domain and a PD-L2 binding domain that each include a common light chain with the IGKV1-39_L1 variable light domain (SEQ ID NO:3239). In some embodiments, the anti-PD-L2 antibody is an anti-CD28×anti-PD-L1×anti-PD-L2 antibody having a CD28 binding domain, a PD-L1 binding domain, and a PD-L2 binding domain that each include a common light chain with the IGKV1-39_L1 variable light domain (SEQ ID NO:3239). Such PD-L2 binding domains that utilize a common light chain with the IGKV1-39_L1 variable light domain (SEQ ID NO:3239) can be used, for example, in any of the antibody formats provided herein that utilize a common light chain (see, e.g., 1+1 CLC, 2+1 CLC, 1+1+1 stackFab2-scFv-Fc, 1+1+1 Fab-(Fab-scFv)-Fc, 1+1+1 mAb-scFv, and 1+1+1 stackFab2-Fab-Fc formats disclosed herein, FIGS. 82 and 83).

[0478] In one embodiment, the PD-L2 antigen binding domain includes the vhCDR1-3 of any of the PD-L2 variable heavy domains depicted in FIG. 161 (SEQ ID NOs:3335, and 3243-3260), and the vlCDR1-3 of the IGK1-39_L1 variable light domain (SEQ ID NO:3239).

[0479] In one embodiment, the PD-L2 ABD of the subject anti-PD-L2 antibodies described herein includes a) a vhCDR1, vhCDR2, and/or vhCDR3 with 1, 2, 3, 4, 5, 6, 7, 8, 9, 10 amino acid modifications as compared to the vhCDR1, vhCDR2, and/or vhCDR3 of one of the PD-L2 variable heavy domains depicted in FIG. 162 (SEQ ID NOs:3267, and 3275-3347), respectively, and/or b) a vlCDR1, vlCDR2, and/or vlCDR3 with 1, 2, 3, 4, 5, 6, 7, 8, 9, 10 amino acid modifications as compared to the vlCDR1, vlCDR2, and/or vlCDR3 of the IGK1-39_L1 variable light domain (SEQ ID NO:3239), respectively. In certain embodiments, the PD-L2 ABD of the subject anti-PD-L2 antibody is capable of binding PD-L2 antigen, as measured by at least one of a Biacore, surface plasmon resonance (SPR), flow cytometry, and/or BLI (biolayer interferometry, e.g., Octet assay) assay, with the latter finding particular use in many embodiments. In particular embodiments, the PD-L2 ABD is capable of binding human PD-L2 antigen (see FIG. 1).

[0480] In one embodiment, the PD-L2 ABD of the subject anti-PD-L2 antibody includes a vhCDR1, vhCDR2, and/or vhCDR3 that is at least 90, 95, 97, 98 or 99% identical to the vhCDR1, vhCDR2, and/or vhCDR3 of one of the PD-L2 variable heavy domains depicted in FIG. 162 (SEQ ID NOs:3267, and 3275-3347), respectively, and/or a vlCDR1, vlCDR2, and/or vlCDR3 that is at least 90, 95, 97, 98 or 99% identical to the vlCDR1, vlCDR2, and/or vlCDR3 of the IGK1-39_L1 variable light domain (SEQ ID NO:3239), respectively. In certain embodiments, the PD-L2 ABD is capable of binding to the PD-L2, as measured by at least one of a Biacore, surface plasmon resonance (SPR), flow cytometry, and/or BLI (biolayer interferometry, e.g., Octet assay) assay, with the latter finding particular use in many embodiments. In particular embodiments, the PD-L2 ABD is capable of binding human PD-L2 antigen (see FIG. 1).

[0481] In another exemplary embodiment, the PD-L2 ABD of the subject anti-PD-L2 antibody includes the variable heavy (VH) domain of one of the PD-L2 variable heavy domains depicted in FIG. 162 (SEQ ID NOs:3267, and 3275-3347), and the IGK1-39_L1 variable light domain (SEQ ID NO:3239).

[0482] In some embodiments, the anti-PD-L2 antibody includes a PD-L2 ABD that includes a variable heavy domain that is a variant of one of the PD-L2 variable heavy domains depicted in FIG. 162 (SEQ ID NOs:3267, and 3275-3347), and/or a variable light domain that is a variant of the IGK1-39_L1 variable light domain (SEQ ID NO:3239). In some embodiments, the variant VH domain has from 1, 2, 3, 4, 5, 6, 7, 8, 9 or 10 amino acid changes compared to one of the PD-L2 variable heavy domains depicted in FIG. 162 (SEQ ID NOs:3267, and 3275-3347) and/or the variable light domain has from 1, 2, 3, 4, 5, 6, 7, 8, 9 or 10 amino acid changes from the IGK1-39_L1 variable light domain (SEQ ID NO:3239). In some embodiments, the one or more amino acid changes are in the VH and/or VL framework regions (FR1, FR2, FR3, and/or FR4). In some embodiments, the one or more amino acid change(s) are in one or more CDRs. In certain embodiments, the PD-L2 ABD is capable of binding to PD-L2, as measured by at least one of a Biacore, surface plasmon resonance (SPR), flow cytometry, and/or BLI (biolayer interferometry, e.g., Octet assay) assay, with the latter finding particular use in many embodiments. In particular embodiments, the PD-L2 ABD is capable of binding human PD-L2 antigen (see FIG. 1).

[0483] In one embodiment, the variant VH domain is at least 90, 95, 97, 98 or 99% identical to one of the PD-L2 variable heavy domains depicted in FIG. 162 (SEQ ID NOs:3267, and 3275-3347) and/or the variable light domain is at least 90, 95, 97, 98 or 99% identical to the IGK1-39_L1 variable light domain (SEQ ID NO:3239). In certain embodiments, the PD-L2 ABD is capable of binding to PD-L2, as measured by at least one of a Biacore, surface plasmon resonance (SPR), flow cytometry, and/or BLI (biolayer interferometry, e.g., Octet assay) assay, with the latter finding particular use in many embodiments. In particular embodiments, the PD-L2 ABD is capable of binding human PD-L2 antigen (see FIG. 1).

[0484] In some embodiments, the PD-L2 binding domain includes a VH that includes any one of the VHCDR1-3 and/or HFR1-4 sequences depicted in FIG. 162G and the IGK1-39_L1 variable light domain (SEQ ID NO:3239) or a variant thereof.

[0485] In another aspect, provided herein is a PD-L2 binding domain that competes with any of the PD-L1 binding domains disclosed herein for binding to human PD-L2.

### C. CD28 Antigen Binding Domains

[0486] In one aspect, provided herein are CD28 antigen binding domains (ABDs) and compositions that include such CD28 antigen binding domains (ABDs), including anti-CD28 antibodies (e.g., anti-PD-L1×anti-CD28 bispecific antibodies, and anti-PD-L1×anti-PD-L2×anti-CD28 trispecific antibodies). Such CD28 binding domains and related antibodies (e.g., bispecific and trispecific antibodies disclosed herein) find use, for example, in the treatment of CD28 associated cancers. In some embodiments, the CD28 ABDs are capable of binding to human and cynomolgus CD28 (see FIG. 2 and Example 2).

[0487] As will be appreciated by those in the art, suitable CD28 binding domains can comprise a set of 6 CDRs as depicted in FIGS. 41-74 and the Sequence Listing. Suitable CD28 ABDs can also include the entire VH and VL sequences as depicted in these sequences and FIGS. 41-74, and the Sequence Listing, used as scFvs or as Fab domains.

[0488] In one embodiment, the CD28 antigen binding domain includes the 6 CDRs (i.e., vhCDR1-3 and vlCDR1-3) of a CD28 ABD described herein, including FIGS. 41-74, and the Sequence Listing, either as the CDRs are underlined or, in the case where a different numbering scheme is used as described herein and as shown in Table 2, as the CDRs that are identified using other alignments within the variable heavy (VH) domain and variable light domain (VL) sequences of those depicted in FIGS. 41-74, and the Sequence Listing (see Table 2). Suitable CD28 ABDs can also include the entire VH and VL sequences as depicted in these sequences and figures, used as scFvs or as Fab domains.

[0489] In one embodiment, the CD28 antigen binding domain includes the 6 CDRs (i.e., vhCDR1-3 and vlCDR1-3) of an CD28 ABD described herein, including FIGS. 41-74, and the Sequence Listing. In exemplary embodiments, the CD28 antigen binding domain comprises the 6 CDRs of a CD28 comprising a variable heavy domain (VH) and a variable light domain (VL), wherein VH and VL selected from the following:
[0490] (i) a VH having an amino acid sequence of SEQ ID NO:89; and (ii) a VL having an amino acid sequence of SEQ ID NO:93;
[0491] (i) a VH having an amino acid sequence of SEQ ID NO:97; and (ii) a VL having an amino acid sequence of SEQ ID NO:101;
[0492] (i) a VH having an amino acid sequence of SEQ ID NO:105; and (ii) a VL having an amino acid sequence of SEQ ID NO:109;
[0493] (i) a VH having an amino acid sequence of SEQ ID NO:113; and (ii) a VL having an amino acid sequence of SEQ ID NO:117;
[0494] (i) a VH having an amino acid sequence of SEQ ID NO:121; and (ii) a VL having an amino acid sequence of SEQ ID NO:125;
[0495] (i) a VH having an amino acid sequence of SEQ ID NO:129; and (ii) a VL having an amino acid sequence of SEQ ID NO:133;
[0496] (i) a VH having an amino acid sequence of SEQ ID NO:137; and (ii) a VL having an amino acid sequence of SEQ ID NO:141;
[0497] (i) a VH having an amino acid sequence of SEQ ID NO:145; and (ii) a VL having an amino acid sequence of SEQ ID NO:149;
[0498] (i) a VH having an amino acid sequence of SEQ ID NO:153; and (ii) a VL having an amino acid sequence of SEQ ID NO:157;
[0499] (i) a VH having an amino acid sequence of SEQ ID NO:161; and (ii) a VL having an amino acid sequence of SEQ ID NO:165;
[0500] (i) a VH having an amino acid sequence of SEQ ID NO:169; and (ii) a VL having an amino acid sequence of SEQ ID NO:173;
[0501] (i) a VH having an amino acid sequence of SEQ ID NO:177; and (ii) a VL having an amino acid sequence of SEQ ID NO:181;
[0502] (i) a VH having an amino acid sequence of SEQ ID NO:185; and (ii) a VL having an amino acid sequence of SEQ ID NO:189;
[0503] (i) a VH having an amino acid sequence of SEQ ID NO:193; and (ii) a VL having an amino acid sequence of SEQ ID NO:197;
[0504] (i) a VH having an amino acid sequence of SEQ ID NO:201; and (ii) a VL having an amino acid sequence of SEQ ID NO:205;
[0505] (i) a VH having an amino acid sequence of SEQ ID NO:209; and (ii) a VL having an amino acid sequence of SEQ ID NO:213;
[0506] (i) a VH having an amino acid sequence of SEQ ID NO:217; and (ii) a VL having an amino acid sequence of SEQ ID NO:221;
[0507] (i) a VH having an amino acid sequence of SEQ ID NO:225; and (ii) a VL having an amino acid sequence of SEQ ID NO:229;
[0508] (i) a VH having an amino acid sequence of SEQ ID NO:233; and (ii) a VL having an amino acid sequence of SEQ ID NO:237; and
[0509] (i) a VH having an amino acid sequence of SEQ ID NO:241; and (ii) a VL having an amino acid sequence of SEQ ID NO:245;
[0510] (i) a VH having an amino acid sequence of SEQ ID NO:249; and (ii) a VL having an amino acid sequence of SEQ ID NO:253;
[0511] (i) a VH having an amino acid sequence of SEQ ID NO:257; and (ii) a VL having an amino acid sequence of SEQ ID NO:261;
[0512] (i) a VH having an amino acid sequence of SEQ ID NO:265; and (ii) a VL having an amino acid sequence of SEQ ID NO:269;
[0513] (i) a VH having an amino acid sequence of SEQ ID NO:273; and (ii) a VL having an amino acid sequence of SEQ ID NO:277;
[0514] (i) a VH having an amino acid sequence of SEQ ID NO:281; and (ii) a VL having an amino acid sequence of SEQ ID NO:285;
[0515] (i) a VH having an amino acid sequence of SEQ ID NO:289; and (ii) a VL having an amino acid sequence of SEQ ID NO:293;
[0516] (i) a VH having an amino acid sequence of SEQ ID NO:297; and (ii) a VL having an amino acid sequence of SEQ ID NO:301;
[0517] (i) a VH having an amino acid sequence of SEQ ID NO:305; and (ii) a VL having an amino acid sequence of SEQ ID NO:309;
[0518] (i) a VH having an amino acid sequence of SEQ ID NO:313; and (ii) a VL having an amino acid sequence of SEQ ID NO:317;
[0519] (i) a VH having an amino acid sequence of SEQ ID NO:321; and (ii) a VL having an amino acid sequence of SEQ ID NO:325;
[0520] (i) a VH having an amino acid sequence of SEQ ID NO:329; and (ii) a VL having an amino acid sequence of SEQ ID NO:333;
[0521] (i) a VH having an amino acid sequence of SEQ ID NO:337; and (ii) a VL having an amino acid sequence of SEQ ID NO:341;
[0522] (i) a VH having an amino acid sequence of SEQ ID NO:89; and (ii) a VL having an amino acid sequence of SEQ ID NO:20;
[0523] (i) a VH having an amino acid sequence of SEQ ID NO:97; and (ii) a VL having an amino acid sequence of SEQ ID NO:20;
[0524] (i) a VH having an amino acid sequence of SEQ ID NO:105; and (ii) a VL having an amino acid sequence of SEQ ID NO:20;
[0525] (i) a VH having an amino acid sequence of SEQ ID NO:113; and (ii) a VL having an amino acid sequence of SEQ ID NO:20;
[0526] (i) a VH having an amino acid sequence of SEQ ID NO:121; and (ii) a VL having an amino acid sequence of SEQ ID NO:20;
[0527] (i) a VH having an amino acid sequence of SEQ ID NO:129; and (ii) a VL having an amino acid sequence of SEQ ID NO:20;
[0528] (i) a VH having an amino acid sequence of SEQ ID NO:137; and (ii) a VL having an amino acid sequence of SEQ ID NO:20;
[0529] (i) a VH having an amino acid sequence of SEQ ID NO:145; and (ii) a VL having an amino acid sequence of SEQ ID NO:20;
[0530] (i) a VH having an amino acid sequence of SEQ ID NO:153; and (ii) a VL having an amino acid sequence of SEQ ID NO:20;
[0531] (i) a VH having an amino acid sequence of SEQ ID NO:161; and (ii) a VL having an amino acid sequence of SEQ ID NO:20;
[0532] (i) a VH having an amino acid sequence of SEQ ID NO:169; and (ii) a VL having an amino acid sequence of SEQ ID NO:20;
[0533] (i) a VH having an amino acid sequence of SEQ ID NO:177; and (ii) a VL having an amino acid sequence of SEQ ID NO:20;
[0534] (i) a VH having an amino acid sequence of SEQ ID NO:185; and (ii) a VL having an amino acid sequence of SEQ ID NO:20;
[0535] (i) a VH having an amino acid sequence of SEQ ID NO:193; and (ii) a VL having an amino acid sequence of SEQ ID NO:20;
[0536] (i) a VH having an amino acid sequence of SEQ ID NO:201; and (ii) a VL having an amino acid sequence of SEQ ID NO:20;
[0537] (i) a VH having an amino acid sequence of SEQ ID NO:209; and (ii) a VL having an amino acid sequence of SEQ ID NO:20;
[0538] (i) a VH having an amino acid sequence of SEQ ID NO:217; and (ii) a VL having an amino acid sequence of SEQ ID NO:20;
[0539] (i) a VH having an amino acid sequence of SEQ ID NO:225; and (ii) a VL having an amino acid sequence of SEQ ID NO:20;
[0540] (i) a VH having an amino acid sequence of SEQ ID NO:233; and (ii) a VL having an amino acid sequence of SEQ ID NO:20; and
[0541] (i) a VH having an amino acid sequence of SEQ ID NO:241; and (ii) a VL having an amino acid sequence of SEQ ID NO:20;
[0542] (i) a VH having an amino acid sequence of SEQ ID NO:249; and (ii) a VL having an amino acid sequence of SEQ ID NO:20;
[0543] (i) a VH having an amino acid sequence of SEQ ID NO:257; and (ii) a VL having an amino acid sequence of SEQ ID NO:20;
[0544] (i) a VH having an amino acid sequence of SEQ ID NO:265; and (ii) a VL having an amino acid sequence of SEQ ID NO:20;
[0545] (i) a VH having an amino acid sequence of SEQ ID NO:273; and (ii) a VL having an amino acid sequence of SEQ ID NO:20;
[0546] (i) a VH having an amino acid sequence of SEQ ID NO:281; and (ii) a VL having an amino acid sequence of SEQ ID NO:20;
[0547] (i) a VH having an amino acid sequence of SEQ ID NO:289; and (ii) a VL having an amino acid sequence of SEQ ID NO:20;
[0548] (i) a VH having an amino acid sequence of SEQ ID NO:297; and (ii) a VL having an amino acid sequence of SEQ ID NO:20;
[0549] (i) a VH having an amino acid sequence of SEQ ID NO:305; and (ii) a VL having an amino acid sequence of SEQ ID NO:20;
[0550] (i) a VH having an amino acid sequence of SEQ ID NO:313; and (ii) a VL having an amino acid sequence of SEQ ID NO:20;
[0551] (i) a VH having an amino acid sequence of SEQ ID NO:321; and (ii) a VL having an amino acid sequence of SEQ ID NO:20;
[0552] (i) a VH having an amino acid sequence of SEQ ID NO:329; and (ii) a VL having an amino acid sequence of SEQ ID NO:20; and
[0553] (i) a VH having an amino acid sequence of SEQ ID NO:337; and (ii) a VL having an amino acid sequence of SEQ ID NO:20. (FIGS. 24, and 41-74).

[0554] In addition to the parental CDR sets disclosed in the figures and sequence listing that form an ABD to CD28, provided herein are variant CD28 ABDS having CDRs that include at least one modification of the CD28 ABD CDRs disclosed herein. In one embodiment, the CD28 ABD includes a set of 6 CDRs with 1, 2, 3, 4, 5, 6, 7, 8, 9, 10 amino acid modifications as compared to the 6 CDRs of an CD28 ABD described herein, including the figures and sequence listing. In exemplary embodiments, the CD28 ABD includes a set of 6 CDRs with 1, 2, 3, 4, 5, 6, 7, 8, 9, 10 amino acid modifications as compared to the 6 CDRs of an CD28 ABD comprising a variable heavy domain (VH) and a variable light domain (VL) selected from the following:
[0555] (i) a VH having an amino acid sequence of SEQ ID NO:89; and (ii) a VL having an amino acid sequence of SEQ ID NO:93;
[0556] (i) a VH having an amino acid sequence of SEQ ID NO:97; and (ii) a VL having an amino acid sequence of SEQ ID NO:101;
[0557] (i) a VH having an amino acid sequence of SEQ ID NO:105; and (ii) a VL having an amino acid sequence of SEQ ID NO:109;
[0558] (i) a VH having an amino acid sequence of SEQ ID NO:113; and (ii) a VL having an amino acid sequence of SEQ ID NO:117;
[0559] (i) a VH having an amino acid sequence of SEQ ID NO:121; and (ii) a VL having an amino acid sequence of SEQ ID NO:125;
[0560] (i) a VH having an amino acid sequence of SEQ ID NO:129; and (ii) a VL having an amino acid sequence of SEQ ID NO:133;
[0561] (i) a VH having an amino acid sequence of SEQ ID NO:137; and (ii) a VL having an amino acid sequence of SEQ ID NO:141;
[0562] (i) a VH having an amino acid sequence of SEQ ID NO:145; and (ii) a VL having an amino acid sequence of SEQ ID NO:149;
[0563] (i) a VH having an amino acid sequence of SEQ ID NO:153; and (ii) a VL having an amino acid sequence of SEQ ID NO:157;
[0564] (i) a VH having an amino acid sequence of SEQ ID NO:161; and (ii) a VL having an amino acid sequence of SEQ ID NO:165;
[0565] (i) a VH having an amino acid sequence of SEQ ID NO:169; and (ii) a VL having an amino acid sequence of SEQ ID NO:173;
[0566] (i) a VH having an amino acid sequence of SEQ ID NO:177; and (ii) a VL having an amino acid sequence of SEQ ID NO:181;
[0567] (i) a VH having an amino acid sequence of SEQ ID NO:185; and (ii) a VL having an amino acid sequence of SEQ ID NO:189;
[0568] (i) a VH having an amino acid sequence of SEQ ID NO:193; and (ii) a VL having an amino acid sequence of SEQ ID NO:197;
[0569] (i) a VH having an amino acid sequence of SEQ ID NO:201; and (ii) a VL having an amino acid sequence of SEQ ID NO:205;
[0570] (i) a VH having an amino acid sequence of SEQ ID NO:209; and (ii) a VL having an amino acid sequence of SEQ ID NO:213;
[0571] (i) a VH having an amino acid sequence of SEQ ID NO:217; and (ii) a VL having an amino acid sequence of SEQ ID NO:221;
[0572] (i) a VH having an amino acid sequence of SEQ ID NO:225; and (ii) a VL having an amino acid sequence of SEQ ID NO:229;
[0573] (i) a VH having an amino acid sequence of SEQ ID NO:233; and (ii) a VL having an amino acid sequence of SEQ ID NO:237; and
[0574] (i) a VH having an amino acid sequence of SEQ ID NO:241; and (ii) a VL having an amino acid sequence of SEQ ID NO:245;
[0575] (i) a VH having an amino acid sequence of SEQ ID NO:249; and (ii) a VL having an amino acid sequence of SEQ ID NO:253;
[0576] (i) a VH having an amino acid sequence of SEQ ID NO:257; and (ii) a VL having an amino acid sequence of SEQ ID NO:261;
[0577] (i) a VH having an amino acid sequence of SEQ ID NO:265; and (ii) a VL having an amino acid sequence of SEQ ID NO:269;
[0578] (i) a VH having an amino acid sequence of SEQ ID NO:273; and (ii) a VL having an amino acid sequence of SEQ ID NO:277;
[0579] (i) a VH having an amino acid sequence of SEQ ID NO:281; and (ii) a VL having an amino acid sequence of SEQ ID NO:285;
[0580] (i) a VH having an amino acid sequence of SEQ ID NO:289; and (ii) a VL having an amino acid sequence of SEQ ID NO:293;
[0581] (i) a VH having an amino acid sequence of SEQ ID NO:297; and (ii) a VL having an amino acid sequence of SEQ ID NO:301;
[0582] (i) a VH having an amino acid sequence of SEQ ID NO:305; and (ii) a VL having an amino acid sequence of SEQ ID NO:309;
[0583] (i) a VH having an amino acid sequence of SEQ ID NO:313; and (ii) a VL having an amino acid sequence of SEQ ID NO:317;
[0584] (i) a VH having an amino acid sequence of SEQ ID NO:321; and (ii) a VL having an amino acid sequence of SEQ ID NO:325;
[0585] (i) a VH having an amino acid sequence of SEQ ID NO:329; and (ii) a VL having an amino acid sequence of SEQ ID NO:333;
[0586] (i) a VH having an amino acid sequence of SEQ ID NO:337; and (ii) a VL having an amino acid sequence of SEQ ID NO:341;
[0587] (i) a VH having an amino acid sequence of SEQ ID NO:89; and (ii) a VL having an amino acid sequence of SEQ ID NO:20;
[0588] (i) a VH having an amino acid sequence of SEQ ID NO:97; and (ii) a VL having an amino acid sequence of SEQ ID NO:20;
[0589] (i) a VH having an amino acid sequence of SEQ ID NO:105; and (ii) a VL having an amino acid sequence of SEQ ID NO:20;
[0590] (i) a VH having an amino acid sequence of SEQ ID NO:113; and (ii) a VL having an amino acid sequence of SEQ ID NO:20;
[0591] (i) a VH having an amino acid sequence of SEQ ID NO:121; and (ii) a VL having an amino acid sequence of SEQ ID NO:20;
[0592] (i) a VH having an amino acid sequence of SEQ ID NO:129; and (ii) a VL having an amino acid sequence of SEQ ID NO:20;
[0593] (i) a VH having an amino acid sequence of SEQ ID NO:137; and (ii) a VL having an amino acid sequence of SEQ ID NO:20;
[0594] (i) a VH having an amino acid sequence of SEQ ID NO:145; and (ii) a VL having an amino acid sequence of SEQ ID NO:20;
[0595] (i) a VH having an amino acid sequence of SEQ ID NO:153; and (ii) a VL having an amino acid sequence of SEQ ID NO:20;
[0596] (i) a VH having an amino acid sequence of SEQ ID NO:161; and (ii) a VL having an amino acid sequence of SEQ ID NO:20;
[0597] (i) a VH having an amino acid sequence of SEQ ID NO:169; and (ii) a VL having an amino acid sequence of SEQ ID NO:20;
[0598] (i) a VH having an amino acid sequence of SEQ ID NO:177; and (ii) a VL having an amino acid sequence of SEQ ID NO:20;
[0599] (i) a VH having an amino acid sequence of SEQ ID NO:185; and (ii) a VL having an amino acid sequence of SEQ ID NO:20;
[0600] (i) a VH having an amino acid sequence of SEQ ID NO:193; and (ii) a VL having an amino acid sequence of SEQ ID NO:20;
[0601] (i) a VH having an amino acid sequence of SEQ ID NO:201; and (ii) a VL having an amino acid sequence of SEQ ID NO:20;
[0602] (i) a VH having an amino acid sequence of SEQ ID NO:209; and (ii) a VL having an amino acid sequence of SEQ ID NO:20;
[0603] (i) a VH having an amino acid sequence of SEQ ID NO:217; and (ii) a VL having an amino acid sequence of SEQ ID NO:20;
[0604] (i) a VH having an amino acid sequence of SEQ ID NO:225; and (ii) a VL having an amino acid sequence of SEQ ID NO:20;
[0605] (i) a VH having an amino acid sequence of SEQ ID NO:233; and (ii) a VL having an amino acid sequence of SEQ ID NO:20; and
[0606] (i) a VH having an amino acid sequence of SEQ ID NO:241; and (ii) a VL having an amino acid sequence of SEQ ID NO:20;
[0607] (i) a VH having an amino acid sequence of SEQ ID NO:249; and (ii) a VL having an amino acid sequence of SEQ ID NO:20;
[0608] (i) a VH having an amino acid sequence of SEQ ID NO:257; and (ii) a VL having an amino acid sequence of SEQ ID NO:20;
[0609] (i) a VH having an amino acid sequence of SEQ ID NO:265; and (ii) a VL having an amino acid sequence of SEQ ID NO:20;
[0610] (i) a VH having an amino acid sequence of SEQ ID NO:273; and (ii) a VL having an amino acid sequence of SEQ ID NO:20;
[0611] (i) a VH having an amino acid sequence of SEQ ID NO:281; and (ii) a VL having an amino acid sequence of SEQ ID NO:20;
[0612] (i) a VH having an amino acid sequence of SEQ ID NO:289; and (ii) a VL having an amino acid sequence of SEQ ID NO:20;
[0613] (i) a VH having an amino acid sequence of SEQ ID NO:297; and (ii) a VL having an amino acid sequence of SEQ ID NO:20;
[0614] (i) a VH having an amino acid sequence of SEQ ID NO:305; and (ii) a VL having an amino acid sequence of SEQ ID NO:20;
[0615] (i) a VH having an amino acid sequence of SEQ ID NO:313; and (ii) a VL having an amino acid sequence of SEQ ID NO:20;
[0616] (i) a VH having an amino acid sequence of SEQ ID NO:321; and (ii) a VL having an amino acid sequence of SEQ ID NO:20;
[0617] (i) a VH having an amino acid sequence of SEQ ID NO:329; and (ii) a VL having an amino acid sequence of SEQ ID NO:20; and
[0618] (i) a VH having an amino acid sequence of SEQ ID NO:337; and (ii) a VL having an amino acid sequence of SEQ ID NO:20. (FIGS. 24, and 29-32).

[0619] In certain embodiments, the variant CD28 ABD is capable of binding CD28 antigen, as measured by at least one of a Biacore, surface plasmon resonance (SPR) and/or BLI (biolayer interferometry, e.g., Octet assay) assay, with the latter finding particular use in many embodiments. In particular embodiments, the CD28 ABD is capable of binding to human and cynomolgus CD28.

[0620] In one embodiment, the anti-CD28 ABD includes 6 CDRs that are at least 90, 95, 97, 98 or 99% identical to the 6 CDRs of an anti-CD28 ABD as described herein, including FIGS. 24, and 41-74, and the Sequence Listing. In exemplary embodiments, the anti-CD28 ABD includes 6 CDRs that are at least 90, 95, 97, 98 or 99% identical to the 6 CDRs of an CD28 ABD comprising a variable heavy domain (VH) and a variable light domain (VL) selected from the following:
[0621] (i) a VH having an amino acid sequence of SEQ ID NO:89; and (ii) a VL having an amino acid sequence of SEQ ID NO:93;
[0622] (i) a VH having an amino acid sequence of SEQ ID NO:97; and (ii) a VL having an amino acid sequence of SEQ ID NO:101;
[0623] (i) a VH having an amino acid sequence of SEQ ID NO:105; and (ii) a VL having an amino acid sequence of SEQ ID NO:109;
[0624] (i) a VH having an amino acid sequence of SEQ ID NO:113; and (ii) a VL having an amino acid sequence of SEQ ID NO:117;
[0625] (i) a VH having an amino acid sequence of SEQ ID NO:121; and (ii) a VL having an amino acid sequence of SEQ ID NO:125;
[0626] (i) a VH having an amino acid sequence of SEQ ID NO:129; and (ii) a VL having an amino acid sequence of SEQ ID NO:133;
[0627] (i) a VH having an amino acid sequence of SEQ ID NO:137; and (ii) a VL having an amino acid sequence of SEQ ID NO:141;
[0628] (i) a VH having an amino acid sequence of SEQ ID NO:145; and (ii) a VL having an amino acid sequence of SEQ ID NO:149;
[0629] (i) a VH having an amino acid sequence of SEQ ID NO:153; and (ii) a VL having an amino acid sequence of SEQ ID NO:157;
[0630] (i) a VH having an amino acid sequence of SEQ ID NO:161; and (ii) a VL having an amino acid sequence of SEQ ID NO:165;
[0631] (i) a VH having an amino acid sequence of SEQ ID NO:169; and (ii) a VL having an amino acid sequence of SEQ ID NO:173;
[0632] (i) a VH having an amino acid sequence of SEQ ID NO:177; and (ii) a VL having an amino acid sequence of SEQ ID NO:181;
[0633] (i) a VH having an amino acid sequence of SEQ ID NO:185; and (ii) a VL having an amino acid sequence of SEQ ID NO:189;
[0634] (i) a VH having an amino acid sequence of SEQ ID NO:193; and (ii) a VL having an amino acid sequence of SEQ ID NO:197;
[0635] (i) a VH having an amino acid sequence of SEQ ID NO:201; and (ii) a VL having an amino acid sequence of SEQ ID NO:205;
[0636] (i) a VH having an amino acid sequence of SEQ ID NO:209; and (ii) a VL having an amino acid sequence of SEQ ID NO:213;
[0637] (i) a VH having an amino acid sequence of SEQ ID NO:217; and (ii) a VL having an amino acid sequence of SEQ ID NO:221;
[0638] (i) a VH having an amino acid sequence of SEQ ID NO:225; and (ii) a VL having an amino acid sequence of SEQ ID NO:229;
[0639] (i) a VH having an amino acid sequence of SEQ ID NO:233; and (ii) a VL having an amino acid sequence of SEQ ID NO:237; and
[0640] (i) a VH having an amino acid sequence of SEQ ID NO:241; and (ii) a VL having an amino acid sequence of SEQ ID NO:245;
[0641] (i) a VH having an amino acid sequence of SEQ ID NO:249; and (ii) a VL having an amino acid sequence of SEQ ID NO:253;
[0642] (i) a VH having an amino acid sequence of SEQ ID NO:257; and (ii) a VL having an amino acid sequence of SEQ ID NO:261;
[0643] (i) a VH having an amino acid sequence of SEQ ID NO:265; and (ii) a VL having an amino acid sequence of SEQ ID NO:269;
[0644] (i) a VH having an amino acid sequence of SEQ ID NO:273; and (ii) a VL having an amino acid sequence of SEQ ID NO:277;
[0645] (i) a VH having an amino acid sequence of SEQ ID NO:281; and (ii) a VL having an amino acid sequence of SEQ ID NO:285;
[0646] (i) a VH having an amino acid sequence of SEQ ID NO:289; and (ii) a VL having an amino acid sequence of SEQ ID NO:293;
[0647] (i) a VH having an amino acid sequence of SEQ ID NO:297; and (ii) a VL having an amino acid sequence of SEQ ID NO:301;
[0648] (i) a VH having an amino acid sequence of SEQ ID NO:305; and (ii) a VL having an amino acid sequence of SEQ ID NO:309;
[0649] (i) a VH having an amino acid sequence of SEQ ID NO:313; and (ii) a VL having an amino acid sequence of SEQ ID NO:317;
[0650] (i) a VH having an amino acid sequence of SEQ ID NO:321; and (ii) a VL having an amino acid sequence of SEQ ID NO:325;
[0651] (i) a VH having an amino acid sequence of SEQ ID NO:329; and (ii) a VL having an amino acid sequence of SEQ ID NO:333;
[0652] (i) a VH having an amino acid sequence of SEQ ID NO:337; and (ii) a VL having an amino acid sequence of SEQ ID NO:341;
[0653] (i) a VH having an amino acid sequence of SEQ ID NO:89; and (ii) a VL having an amino acid sequence of SEQ ID NO:20;
[0654] (i) a VH having an amino acid sequence of SEQ ID NO:97; and (ii) a VL having an amino acid sequence of SEQ ID NO:20;
[0655] (i) a VH having an amino acid sequence of SEQ ID NO:105; and (ii) a VL having an amino acid sequence of SEQ ID NO:20;
[0656] (i) a VH having an amino acid sequence of SEQ ID NO:113; and (ii) a VL having an amino acid sequence of SEQ ID NO:20;
[0657] (i) a VH having an amino acid sequence of SEQ ID NO:121; and (ii) a VL having an amino acid sequence of SEQ ID NO:20;
[0658] (i) a VH having an amino acid sequence of SEQ ID NO:129; and (ii) a VL having an amino acid sequence of SEQ ID NO:20;
[0659] (i) a VH having an amino acid sequence of SEQ ID NO:137; and (ii) a VL having an amino acid sequence of SEQ ID NO:20;
[0660] (i) a VH having an amino acid sequence of SEQ ID NO:145; and (ii) a VL having an amino acid sequence of SEQ ID NO:20;
[0661] (i) a VH having an amino acid sequence of SEQ ID NO:153; and (ii) a VL having an amino acid sequence of SEQ ID NO:20;
[0662] (i) a VH having an amino acid sequence of SEQ ID NO:161; and (ii) a VL having an amino acid sequence of SEQ ID NO:20;
[0663] (i) a VH having an amino acid sequence of SEQ ID NO:169; and (ii) a VL having an amino acid sequence of SEQ ID NO:20;
[0664] (i) a VH having an amino acid sequence of SEQ ID NO:177; and (ii) a VL having an amino acid sequence of SEQ ID NO:20;
[0665] (i) a VH having an amino acid sequence of SEQ ID NO:185; and (ii) a VL having an amino acid sequence of SEQ ID NO:20;
[0666] (i) a VH having an amino acid sequence of SEQ ID NO:193; and (ii) a VL having an amino acid sequence of SEQ ID NO:20;
[0667] (i) a VH having an amino acid sequence of SEQ ID NO:201; and (ii) a VL having an amino acid sequence of SEQ ID NO:20;
[0668] (i) a VH having an amino acid sequence of SEQ ID NO:209; and (ii) a VL having an amino acid sequence of SEQ ID NO:20;
[0669] (i) a VH having an amino acid sequence of SEQ ID NO:217; and (ii) a VL having an amino acid sequence of SEQ ID NO:20;
[0670] (i) a VH having an amino acid sequence of SEQ ID NO:225; and (ii) a VL having an amino acid sequence of SEQ ID NO:20;
[0671] (i) a VH having an amino acid sequence of SEQ ID NO:233; and (ii) a VL having an amino acid sequence of SEQ ID NO:20; and
[0672] (i) a VH having an amino acid sequence of SEQ ID NO:241; and (ii) a VL having an amino acid sequence of SEQ ID NO:20;
[0673] (i) a VH having an amino acid sequence of SEQ ID NO:249; and (ii) a VL having an amino acid sequence of SEQ ID NO:20;
[0674] (i) a VH having an amino acid sequence of SEQ ID NO:257; and (ii) a VL having an amino acid sequence of SEQ ID NO:20;
[0675] (i) a VH having an amino acid sequence of SEQ ID NO:265; and (ii) a VL having an amino acid sequence of SEQ ID NO:20;
[0676] (i) a VH having an amino acid sequence of SEQ ID NO:273; and (ii) a VL having an amino acid sequence of SEQ ID NO:20;
[0677] (i) a VH having an amino acid sequence of SEQ ID NO:281; and (ii) a VL having an amino acid sequence of SEQ ID NO:20;
[0678] (i) a VH having an amino acid sequence of SEQ ID NO:289; and (ii) a VL having an amino acid sequence of SEQ ID NO:20;
[0679] (i) a VH having an amino acid sequence of SEQ ID NO:297; and (ii) a VL having an amino acid sequence of SEQ ID NO:20;
[0680] (i) a VH having an amino acid sequence of SEQ ID NO:305; and (ii) a VL having an amino acid sequence of SEQ ID NO:20;
[0681] (i) a VH having an amino acid sequence of SEQ ID NO:313; and (ii) a VL having an amino acid sequence of SEQ ID NO:20;
[0682] (i) a VH having an amino acid sequence of SEQ ID NO:321; and (ii) a VL having an amino acid sequence of SEQ ID NO:20;
[0683] (i) a VH having an amino acid sequence of SEQ ID NO:329; and (ii) a VL having an amino acid sequence of SEQ ID NO:20; and
[0684] (i) a VH having an amino acid sequence of SEQ ID NO:337; and (ii) a VL having an amino acid sequence of SEQ ID NO:20. (FIGS. 24, and 41-74).

[0685] In certain embodiments, the anti-CD28 ABD is capable of binding to CD28 antigen, as measured by at least one of a Biacore, surface plasmon resonance (SPR) and/or BLI (biolayer interferometry, e.g., Octet assay) assay, with the latter finding particular use in many embodiments. In particular embodiments, the CD28 ABD is capable of binding to human and cynomolgus CD28.

[0686] In another exemplary embodiment, the anti-CD28 ABD include the variable heavy (VH) domain and/or variable light (VL) domain of any one of the CD28 ABDs described herein, including FIGS. 24, and 41-74 and the Sequence Listing. In exemplary embodiments, VH and VL are selected from the following:
[0687] (i) a VH having an amino acid sequence of SEQ ID NO:89; and (ii) a VL having an amino acid sequence of SEQ ID NO:93;
[0688] (i) a VH having an amino acid sequence of SEQ ID NO:97; and (ii) a VL having an amino acid sequence of SEQ ID NO:101;
[0689] (i) a VH having an amino acid sequence of SEQ ID NO:105; and (ii) a VL having an amino acid sequence of SEQ ID NO:109;
[0690] (i) a VH having an amino acid sequence of SEQ ID NO:113; and (ii) a VL having an amino acid sequence of SEQ ID NO:117;
[0691] (i) a VH having an amino acid sequence of SEQ ID NO:121; and (ii) a VL having an amino acid sequence of SEQ ID NO:125;
[0692] (i) a VH having an amino acid sequence of SEQ ID NO:129; and (ii) a VL having an amino acid sequence of SEQ ID NO:133;
[0693] (i) a VH having an amino acid sequence of SEQ ID NO:137; and (ii) a VL having an amino acid sequence of SEQ ID NO:141;
[0694] (i) a VH having an amino acid sequence of SEQ ID NO:145; and (ii) a VL having an amino acid sequence of SEQ ID NO:149;
[0695] (i) a VH having an amino acid sequence of SEQ ID NO:153; and (ii) a VL having an amino acid sequence of SEQ ID NO:157;
[0696] (i) a VH having an amino acid sequence of SEQ ID NO:161; and (ii) a VL having an amino acid sequence of SEQ ID NO:165;
[0697] (i) a VH having an amino acid sequence of SEQ ID NO:169; and (ii) a VL having an amino acid sequence of SEQ ID NO:173;
[0698] (i) a VH having an amino acid sequence of SEQ ID NO:177; and (ii) a VL having an amino acid sequence of SEQ ID NO:181;
[0699] (i) a VH having an amino acid sequence of SEQ ID NO:185; and (ii) a VL having an amino acid sequence of SEQ ID NO:189;
[0700] (i) a VH having an amino acid sequence of SEQ ID NO:193; and (ii) a VL having an amino acid sequence of SEQ ID NO:197;
[0701] (i) a VH having an amino acid sequence of SEQ ID NO:201; and (ii) a VL having an amino acid sequence of SEQ ID NO:205;
[0702] (i) a VH having an amino acid sequence of SEQ ID NO:209; and (ii) a VL having an amino acid sequence of SEQ ID NO:213;
[0703] (i) a VH having an amino acid sequence of SEQ ID NO:217; and (ii) a VL having an amino acid sequence of SEQ ID NO:221;
[0704] (i) a VH having an amino acid sequence of SEQ ID NO:225; and (ii) a VL having an amino acid sequence of SEQ ID NO:229;
[0705] (i) a VH having an amino acid sequence of SEQ ID NO:233; and (ii) a VL having an amino acid sequence of SEQ ID NO:237; and
[0706] (i) a VH having an amino acid sequence of SEQ ID NO:241; and (ii) a VL having an amino acid sequence of SEQ ID NO:245;
[0707] (i) a VH having an amino acid sequence of SEQ ID NO:249; and (ii) a VL having an amino acid sequence of SEQ ID NO:253;
[0708] (i) a VH having an amino acid sequence of SEQ ID NO:257; and (ii) a VL having an amino acid sequence of SEQ ID NO:261;
[0709] (i) a VH having an amino acid sequence of SEQ ID NO:265; and (ii) a VL having an amino acid sequence of SEQ ID NO:269;
[0710] (i) a VH having an amino acid sequence of SEQ ID NO:273; and (ii) a VL having an amino acid sequence of SEQ ID NO:277;
[0711] (i) a VH having an amino acid sequence of SEQ ID NO:281; and (ii) a VL having an amino acid sequence of SEQ ID NO:285;
[0712] (i) a VH having an amino acid sequence of SEQ ID NO:289; and (ii) a VL having an amino acid sequence of SEQ ID NO:293;
[0713] (i) a VH having an amino acid sequence of SEQ ID NO:297; and (ii) a VL having an amino acid sequence of SEQ ID NO:301;
[0714] (i) a VH having an amino acid sequence of SEQ ID NO:305; and (ii) a VL having an amino acid sequence of SEQ ID NO:309;
[0715] (i) a VH having an amino acid sequence of SEQ ID NO:313; and (ii) a VL having an amino acid sequence of SEQ ID NO:317;
[0716] (i) a VH having an amino acid sequence of SEQ ID NO:321; and (ii) a VL having an amino acid sequence of SEQ ID NO:325;
[0717] (i) a VH having an amino acid sequence of SEQ ID NO:329; and (ii) a VL having an amino acid sequence of SEQ ID NO:333;
[0718] (i) a VH having an amino acid sequence of SEQ ID NO:337; and (ii) a VL having an amino acid sequence of SEQ ID NO:341;
[0719] (i) a VH having an amino acid sequence of SEQ ID NO:89; and (ii) a VL having an amino acid sequence of SEQ ID NO:20;
[0720] (i) a VH having an amino acid sequence of SEQ ID NO:97; and (ii) a VL having an amino acid sequence of SEQ ID NO:20;
[0721] (i) a VH having an amino acid sequence of SEQ ID NO:105; and (ii) a VL having an amino acid sequence of SEQ ID NO:20;
[0722] (i) a VH having an amino acid sequence of SEQ ID NO:113; and (ii) a VL having an amino acid sequence of SEQ ID NO:20;
[0723] (i) a VH having an amino acid sequence of SEQ ID NO:121; and (ii) a VL having an amino acid sequence of SEQ ID NO:20;
[0724] (i) a VH having an amino acid sequence of SEQ ID NO:129; and (ii) a VL having an amino acid sequence of SEQ ID NO:20;
[0725] (i) a VH having an amino acid sequence of SEQ ID NO:137; and (ii) a VL having an amino acid sequence of SEQ ID NO:20;
[0726] (i) a VH having an amino acid sequence of SEQ ID NO:145; and (ii) a VL having an amino acid sequence of SEQ ID NO:20;
[0727] (i) a VH having an amino acid sequence of SEQ ID NO:153; and (ii) a VL having an amino acid sequence of SEQ ID NO:20;
[0728] (i) a VH having an amino acid sequence of SEQ ID NO:161; and (ii) a VL having an amino acid sequence of SEQ ID NO:20;
[0729] (i) a VH having an amino acid sequence of SEQ ID NO:169; and (ii) a VL having an amino acid sequence of SEQ ID NO:20;
[0730] (i) a VH having an amino acid sequence of SEQ ID NO:177; and (ii) a VL having an amino acid sequence of SEQ ID NO:20;
[0731] (i) a VH having an amino acid sequence of SEQ ID NO:185; and (ii) a VL having an amino acid sequence of SEQ ID NO:20;
[0732] (i) a VH having an amino acid sequence of SEQ ID NO:193; and (ii) a VL having an amino acid sequence of SEQ ID NO:20;
[0733] (i) a VH having an amino acid sequence of SEQ ID NO:201; and (ii) a VL having an amino acid sequence of SEQ ID NO:20;
[0734] (i) a VH having an amino acid sequence of SEQ ID NO:209; and (ii) a VL having an amino acid sequence of SEQ ID NO:20;
[0735] (i) a VH having an amino acid sequence of SEQ ID NO:217; and (ii) a VL having an amino acid sequence of SEQ ID NO:20;
[0736] (i) a VH having an amino acid sequence of SEQ ID NO:225; and (ii) a VL having an amino acid sequence of SEQ ID NO:20;
[0737] (i) a VH having an amino acid sequence of SEQ ID NO:233; and (ii) a VL having an amino acid sequence of SEQ ID NO:20; and
[0738] (i) a VH having an amino acid sequence of SEQ ID NO:241; and (ii) a VL having an amino acid sequence of SEQ ID NO:20;
[0739] (i) a VH having an amino acid sequence of SEQ ID NO:249; and (ii) a VL having an amino acid sequence of SEQ ID NO:20;
[0740] (i) a VH having an amino acid sequence of SEQ ID NO:257; and (ii) a VL having an amino acid sequence of SEQ ID NO:20;
[0741] (i) a VH having an amino acid sequence of SEQ ID NO:265; and (ii) a VL having an amino acid sequence of SEQ ID NO:20;
[0742] (i) a VH having an amino acid sequence of SEQ ID NO:273; and (ii) a VL having an amino acid sequence of SEQ ID NO:20;
[0743] (i) a VH having an amino acid sequence of SEQ ID NO:281; and (ii) a VL having an amino acid sequence of SEQ ID NO:20;
[0744] (i) a VH having an amino acid sequence of SEQ ID NO:289; and (ii) a VL having an amino acid sequence of SEQ ID NO:20;
[0745] (i) a VH having an amino acid sequence of SEQ ID NO:297; and (ii) a VL having an amino acid sequence of SEQ ID NO:20;
[0746] (i) a VH having an amino acid sequence of SEQ ID NO:305; and (ii) a VL having an amino acid sequence of SEQ ID NO:20;
[0747] (i) a VH having an amino acid sequence of SEQ ID NO:313; and (ii) a VL having an amino acid sequence of SEQ ID NO:20;
[0748] (i) a VH having an amino acid sequence of SEQ ID NO:321; and (ii) a VL having an amino acid sequence of SEQ ID NO:20;
[0749] (i) a VH having an amino acid sequence of SEQ ID NO:329; and (ii) a VL having an amino acid sequence of SEQ ID NO:20; and
[0750] (i) a VH having an amino acid sequence of SEQ ID NO:337; and (ii) a VL having an amino acid sequence of SEQ ID NO:20. (FIGS. 24, and 41-74).

[0751] In addition to the parental anti-CD28 binding domain variable heavy and variable light domains disclosed herein, provided herein are anti-CD28 ABDs that include a variable heavy domain and/or a variable light domain that are variants of an anti-CD28 ABD VH and VL domain disclosed herein. In one embodiment, the variant VH domain and/or VL domain has from 1, 2, 3, 4, 5, 6, 7, 8, 9 or 10 amino acid changes from a VH and/or VL domain of an anti-CD28 ABD described herein, including FIGS. 28-31 and the Sequence Listing. In exemplary embodiments, the variant VH domain and/or VL domain has from 1, 2, 3, 4, 5, 6, 7, 8, 9 or 10 amino acid changes from a VH and/or VL are selected from the following:
[0752] (i) a VH having an amino acid sequence of SEQ ID NO:89; and (ii) a VL having an amino acid sequence of SEQ ID NO:93;
[0753] (i) a VH having an amino acid sequence of SEQ ID NO:97; and (ii) a VL having an amino acid sequence of SEQ ID NO:101;
[0754] (i) a VH having an amino acid sequence of SEQ ID NO:105; and (ii) a VL having an amino acid sequence of SEQ ID NO:109;
[0755] (i) a VH having an amino acid sequence of SEQ ID NO:113; and (ii) a VL having an amino acid sequence of SEQ ID NO:117;
[0756] (i) a VH having an amino acid sequence of SEQ ID NO:121; and (ii) a VL having an amino acid sequence of SEQ ID NO:125;
[0757] (i) a VH having an amino acid sequence of SEQ ID NO:129; and (ii) a VL having an amino acid sequence of SEQ ID NO:133;
[0758] (i) a VH having an amino acid sequence of SEQ ID NO:137; and (ii) a VL having an amino acid sequence of SEQ ID NO:141;
[0759] (i) a VH having an amino acid sequence of SEQ ID NO:145; and (ii) a VL having an amino acid sequence of SEQ ID NO:149;
[0760] (i) a VH having an amino acid sequence of SEQ ID NO:153; and (ii) a VL having an amino acid sequence of SEQ ID NO:157;
[0761] (i) a VH having an amino acid sequence of SEQ ID NO:161; and (ii) a VL having an amino acid sequence of SEQ ID NO:165;
[0762] (i) a VH having an amino acid sequence of SEQ ID NO:169; and (ii) a VL having an amino acid sequence of SEQ ID NO:173;
[0763] (i) a VH having an amino acid sequence of SEQ ID NO:177; and (ii) a VL having an amino acid sequence of SEQ ID NO:181;
[0764] (i) a VH having an amino acid sequence of SEQ ID NO:185; and (ii) a VL having an amino acid sequence of SEQ ID NO:189;
[0765] (i) a VH having an amino acid sequence of SEQ ID NO:193; and (ii) a VL having an amino acid sequence of SEQ ID NO:197;
[0766] (i) a VH having an amino acid sequence of SEQ ID NO:201; and (ii) a VL having an amino acid sequence of SEQ ID NO:205;
[0767] (i) a VH having an amino acid sequence of SEQ ID NO:209; and (ii) a VL having an amino acid sequence of SEQ ID NO:213;
[0768] (i) a VH having an amino acid sequence of SEQ ID NO:217; and (ii) a VL having an amino acid sequence of SEQ ID NO:221;
[0769] (i) a VH having an amino acid sequence of SEQ ID NO:225; and (ii) a VL having an amino acid sequence of SEQ ID NO:229;
[0770] (i) a VH having an amino acid sequence of SEQ ID NO:233; and (ii) a VL having an amino acid sequence of SEQ ID NO:237; and
[0771] (i) a VH having an amino acid sequence of SEQ ID NO:241; and (ii) a VL having an amino acid sequence of SEQ ID NO:245;
[0772] (i) a VH having an amino acid sequence of SEQ ID NO:249; and (ii) a VL having an amino acid sequence of SEQ ID NO:253;
[0773] (i) a VH having an amino acid sequence of SEQ ID NO:257; and (ii) a VL having an amino acid sequence of SEQ ID NO:261;
[0774] (i) a VH having an amino acid sequence of SEQ ID NO:265; and (ii) a VL having an amino acid sequence of SEQ ID NO:269;
[0775] (i) a VH having an amino acid sequence of SEQ ID NO:273; and (ii) a VL having an amino acid sequence of SEQ ID NO:277;
[0776] (i) a VH having an amino acid sequence of SEQ ID NO:281; and (ii) a VL having an amino acid sequence of SEQ ID NO:285;
[0777] (i) a VH having an amino acid sequence of SEQ ID NO:289; and (ii) a VL having an amino acid sequence of SEQ ID NO:293;
[0778] (i) a VH having an amino acid sequence of SEQ ID NO:297; and (ii) a VL having an amino acid sequence of SEQ ID NO:301;
[0779] (i) a VH having an amino acid sequence of SEQ ID NO:305; and (ii) a VL having an amino acid sequence of SEQ ID NO:309;
[0780] (i) a VH having an amino acid sequence of SEQ ID NO:313; and (ii) a VL having an amino acid sequence of SEQ ID NO:317;
[0781] (i) a VH having an amino acid sequence of SEQ ID NO:321; and (ii) a VL having an amino acid sequence of SEQ ID NO:325;
[0782] (i) a VH having an amino acid sequence of SEQ ID NO:329; and (ii) a VL having an amino acid sequence of SEQ ID NO:333;
[0783] (i) a VH having an amino acid sequence of SEQ ID NO:337; and (ii) a VL having an amino acid sequence of SEQ ID NO:341;
[0784] (i) a VH having an amino acid sequence of SEQ ID NO:89; and (ii) a VL having an amino acid sequence of SEQ ID NO:20;
[0785] (i) a VH having an amino acid sequence of SEQ ID NO:97; and (ii) a VL having an amino acid sequence of SEQ ID NO:20;
[0786] (i) a VH having an amino acid sequence of SEQ ID NO:105; and (ii) a VL having an amino acid sequence of SEQ ID NO:20;
[0787] (i) a VH having an amino acid sequence of SEQ ID NO:113; and (ii) a VL having an amino acid sequence of SEQ ID NO:20;
[0788] (i) a VH having an amino acid sequence of SEQ ID NO:121; and (ii) a VL having an amino acid sequence of SEQ ID NO:20;
[0789] (i) a VH having an amino acid sequence of SEQ ID NO:129; and (ii) a VL having an amino acid sequence of SEQ ID NO:20;
[0790] (i) a VH having an amino acid sequence of SEQ ID NO:137; and (ii) a VL having an amino acid sequence of SEQ ID NO:20;
[0791] (i) a VH having an amino acid sequence of SEQ ID NO:145; and (ii) a VL having an amino acid sequence of SEQ ID NO:20;
[0792] (i) a VH having an amino acid sequence of SEQ ID NO:153; and (ii) a VL having an amino acid sequence of SEQ ID NO:20;
[0793] (i) a VH having an amino acid sequence of SEQ ID NO:161; and (ii) a VL having an amino acid sequence of SEQ ID NO:20;
[0794] (i) a VH having an amino acid sequence of SEQ ID NO:169; and (ii) a VL having an amino acid sequence of SEQ ID NO:20;
[0795] (i) a VH having an amino acid sequence of SEQ ID NO:177; and (ii) a VL having an amino acid sequence of SEQ ID NO:20;
[0796] (i) a VH having an amino acid sequence of SEQ ID NO:185; and (ii) a VL having an amino acid sequence of SEQ ID NO:20;
[0797] (i) a VH having an amino acid sequence of SEQ ID NO:193; and (ii) a VL having an amino acid sequence of SEQ ID NO:20;
[0798] (i) a VH having an amino acid sequence of SEQ ID NO:201; and (ii) a VL having an amino acid sequence of SEQ ID NO:20;
[0799] (i) a VH having an amino acid sequence of SEQ ID NO:209; and (ii) a VL having an amino acid sequence of SEQ ID NO:20;
[0800] (i) a VH having an amino acid sequence of SEQ ID NO:217; and (ii) a VL having an amino acid sequence of SEQ ID NO:20;
[0801] (i) a VH having an amino acid sequence of SEQ ID NO:225; and (ii) a VL having an amino acid sequence of SEQ ID NO:20;
[0802] (i) a VH having an amino acid sequence of SEQ ID NO:233; and (ii) a VL having an amino acid sequence of SEQ ID NO:20; and
[0803] (i) a VH having an amino acid sequence of SEQ ID NO:241; and (ii) a VL having an amino acid sequence of SEQ ID NO:20;
[0804] (i) a VH having an amino acid sequence of SEQ ID NO:249; and (ii) a VL having an amino acid sequence of SEQ ID NO:20;
[0805] (i) a VH having an amino acid sequence of SEQ ID NO:257; and (ii) a VL having an amino acid sequence of SEQ ID NO:20;
[0806] (i) a VH having an amino acid sequence of SEQ ID NO:265; and (ii) a VL having an amino acid sequence of SEQ ID NO:20;
[0807] (i) a VH having an amino acid sequence of SEQ ID NO:273; and (ii) a VL having an amino acid sequence of SEQ ID NO:20;
[0808] (i) a VH having an amino acid sequence of SEQ ID NO:281; and (ii) a VL having an amino acid sequence of SEQ ID NO:20;
[0809] (i) a VH having an amino acid sequence of SEQ ID NO:289; and (ii) a VL having an amino acid sequence of SEQ ID NO:20;
[0810] (i) a VH having an amino acid sequence of SEQ ID NO:297; and (ii) a VL having an amino acid sequence of SEQ ID NO:20;
[0811] (i) a VH having an amino acid sequence of SEQ ID NO:305; and (ii) a VL having an amino acid sequence of SEQ ID NO:20;
[0812] (i) a VH having an amino acid sequence of SEQ ID NO:313; and (ii) a VL having an amino acid sequence of SEQ ID NO:20;
[0813] (i) a VH having an amino acid sequence of SEQ ID NO:321; and (ii) a VL having an amino acid sequence of SEQ ID NO:20;
[0814] (i) a VH having an amino acid sequence of SEQ ID NO:329; and (ii) a VL having an amino acid sequence of SEQ ID NO:20; and
[0815] (i) a VH having an amino acid sequence of SEQ ID NO:337; and (ii) a VL having an amino acid sequence of SEQ ID NO:20. (FIGS. 24, and 41-74).

[0816] In certain embodiments, the anti-CD28 ABD is capable of binding to CD28, as measured at least one of a Biacore, surface plasmon resonance (SPR) and/or BLI (biolayer interferometry, e.g., Octet assay) assay, with the latter finding particular use in many embodiments. In particular embodiments, the CD28 ABD is capable of binding to human and cynomolgus CD28.

[0817] In some embodiments, the CD28 ABD includes a variable heavy domain that has from 1, 2, 3, 4, 5, 6, 7, 8, 9 or 10 amino acid changes one of the following CD28 ABD variable heavy domains: SEQ ID NOs:89, 97, 105, 113, 121, 129, 137, 145, 153, 161, 169, 177, 185, 193, 201, 209, 217, 225, 233, 241, 249, 257, 265, 273, 281, 289, 297, 305, 313, 321, 329, and 337. In some embodiments, the CD28 ABD includes any of the variable light domains provided herein or a variant thereof.

[0818] In some embodiments, the CD28 ABD includes a variable light domain that has from 1, 2, 3, 4, 5, 6, 7, 8, 9 or 10 amino acid changes one of the following CD28 ABD variable light domains: SEQ ID NOs: 20, 93, 101, 109, 117, 125, 133, 141, 149, 157, 165, 173, 181, 189, 197, 205, 213, 221, 229, 237, 245, 253, 261, 269, 277, 285, 293, 301, 309, 317, 325, 333 and, 341. In some embodiments, the CD28 ABD includes any of the variable heavy domains provided herein or a variant thereof.

[0819] In one embodiment, the variant VH and/or VL domain is at least 90, 95, 97, 98 or 99% identical to the VH and/or VL of an anti-CD28 ABD as described herein, including FIGS. 41-74, and the Sequence Listing. In exemplary embodiments, the variant VH and/or VL domain is at least 90, 95, 97, 98 or 99% identical to the VH and/or VL of one of an anti-CD28 ABD comprising a VH and VL selected from the following:
[0820] (i) a VH having an amino acid sequence of SEQ ID NO: 89; and (ii) a VL having an amino acid sequence of SEQ ID NO:93;
[0821] (i) a VH having an amino acid sequence of SEQ ID NO:97; and (ii) a VL having an amino acid sequence of SEQ ID NO:101;
[0822] (i) a VH having an amino acid sequence of SEQ ID NO:105; and (ii) a VL having an amino acid sequence of SEQ ID NO:109;
[0823] (i) a VH having an amino acid sequence of SEQ ID NO:113; and (ii) a VL having an amino acid sequence of SEQ ID NO:117;
[0824] (i) a VH having an amino acid sequence of SEQ ID NO:121; and (ii) a VL having an amino acid sequence of SEQ ID NO:125;
[0825] (i) a VH having an amino acid sequence of SEQ ID NO:129; and (ii) a VL having an amino acid sequence of SEQ ID NO:133;
[0826] (i) a VH having an amino acid sequence of SEQ ID NO:137; and (ii) a VL having an amino acid sequence of SEQ ID NO:141;
[0827] (i) a VH having an amino acid sequence of SEQ ID NO:145; and (ii) a VL having an amino acid sequence of SEQ ID NO:149;
[0828] (i) a VH having an amino acid sequence of SEQ ID NO:153; and (ii) a VL having an amino acid sequence of SEQ ID NO:157;
[0829] (i) a VH having an amino acid sequence of SEQ ID NO:161; and (ii) a VL having an amino acid sequence of SEQ ID NO:165;
[0830] (i) a VH having an amino acid sequence of SEQ ID NO:169; and (ii) a VL having an amino acid sequence of SEQ ID NO:173;
[0831] (i) a VH having an amino acid sequence of SEQ ID NO:177; and (ii) a VL having an amino acid sequence of SEQ ID NO:181;
[0832] (i) a VH having an amino acid sequence of SEQ ID NO:185; and (ii) a VL having an amino acid sequence of SEQ ID NO:189;
[0833] (i) a VH having an amino acid sequence of SEQ ID NO:193; and (ii) a VL having an amino acid sequence of SEQ ID NO:197;
[0834] (i) a VH having an amino acid sequence of SEQ ID NO:201; and (ii) a VL having an amino acid sequence of SEQ ID NO:205;
[0835] (i) a VH having an amino acid sequence of SEQ ID NO:209; and (ii) a VL having an amino acid sequence of SEQ ID NO:213;
[0836] (i) a VH having an amino acid sequence of SEQ ID NO:217; and (ii) a VL having an amino acid sequence of SEQ ID NO:221;
[0837] (i) a VH having an amino acid sequence of SEQ ID NO:225; and (ii) a VL having an amino acid sequence of SEQ ID NO:229;
[0838] (i) a VH having an amino acid sequence of SEQ ID NO:233; and (ii) a VL having an amino acid sequence of SEQ ID NO:237; and
[0839] (i) a VH having an amino acid sequence of SEQ ID NO:241; and (ii) a VL having an amino acid sequence of SEQ ID NO:245;
[0840] (i) a VH having an amino acid sequence of SEQ ID NO:249; and (ii) a VL having an amino acid sequence of SEQ ID NO:253;
[0841] (i) a VH having an amino acid sequence of SEQ ID NO:257; and (ii) a VL having an amino acid sequence of SEQ ID NO:261;
[0842] (i) a VH having an amino acid sequence of SEQ ID NO:265; and (ii) a VL having an amino acid sequence of SEQ ID NO:269;
[0843] (i) a VH having an amino acid sequence of SEQ ID NO:273; and (ii) a VL having an amino acid sequence of SEQ ID NO:277;
[0844] (i) a VH having an amino acid sequence of SEQ ID NO:281; and (ii) a VL having an amino acid sequence of SEQ ID NO:285;
[0845] (i) a VH having an amino acid sequence of SEQ ID NO:289; and (ii) a VL having an amino acid sequence of SEQ ID NO:293;
[0846] (i) a VH having an amino acid sequence of SEQ ID NO:297; and (ii) a VL having an amino acid sequence of SEQ ID NO:301;
[0847] (i) a VH having an amino acid sequence of SEQ ID NO:305; and (ii) a VL having an amino acid sequence of SEQ ID NO:309;
[0848] (i) a VH having an amino acid sequence of SEQ ID NO:313; and (ii) a VL having an amino acid sequence of SEQ ID NO:317;
[0849] (i) a VH having an amino acid sequence of SEQ ID NO:321; and (ii) a VL having an amino acid sequence of SEQ ID NO:325;
[0850] (i) a VH having an amino acid sequence of SEQ ID NO:329; and (ii) a VL having an amino acid sequence of SEQ ID NO:333;
[0851] (i) a VH having an amino acid sequence of SEQ ID NO:337; and (ii) a VL having an amino acid sequence of SEQ ID NO:341;
[0852] (i) a VH having an amino acid sequence of SEQ ID NO:89; and (ii) a VL having an amino acid sequence of SEQ ID NO:20;
[0853] (i) a VH having an amino acid sequence of SEQ ID NO:97; and (ii) a VL having an amino acid sequence of SEQ ID NO:20;
[0854] (i) a VH having an amino acid sequence of SEQ ID NO:105; and (ii) a VL having an amino acid sequence of SEQ ID NO:20;
[0855] (i) a VH having an amino acid sequence of SEQ ID NO:113; and (ii) a VL having an amino acid sequence of SEQ ID NO:20;
[0856] (i) a VH having an amino acid sequence of SEQ ID NO:121; and (ii) a VL having an amino acid sequence of SEQ ID NO:20;
[0857] (i) a VH having an amino acid sequence of SEQ ID NO:129; and (ii) a VL having an amino acid sequence of SEQ ID NO:20;
[0858] (i) a VH having an amino acid sequence of SEQ ID NO:137; and (ii) a VL having an amino acid sequence of SEQ ID NO:20;
[0859] (i) a VH having an amino acid sequence of SEQ ID NO:145; and (ii) a VL having an amino acid sequence of SEQ ID NO:20;
[0860] (i) a VH having an amino acid sequence of SEQ ID NO:153; and (ii) a VL having an amino acid sequence of SEQ ID NO:20;
[0861] (i) a VH having an amino acid sequence of SEQ ID NO:161; and (ii) a VL having an amino acid sequence of SEQ ID NO:20;
[0862] (i) a VH having an amino acid sequence of SEQ ID NO:169; and (ii) a VL having an amino acid sequence of SEQ ID NO:20;
[0863] (i) a VH having an amino acid sequence of SEQ ID NO:177; and (ii) a VL having an amino acid sequence of SEQ ID NO:20;
[0864] (i) a VH having an amino acid sequence of SEQ ID NO:185; and (ii) a VL having an amino acid sequence of SEQ ID NO:20;
[0865] (i) a VH having an amino acid sequence of SEQ ID NO:193; and (ii) a VL having an amino acid sequence of SEQ ID NO:20;
[0866] (i) a VH having an amino acid sequence of SEQ ID NO:201; and (ii) a VL having an amino acid sequence of SEQ ID NO:20;
[0867] (i) a VH having an amino acid sequence of SEQ ID NO:209; and (ii) a VL having an amino acid sequence of SEQ ID NO:20;
[0868] (i) a VH having an amino acid sequence of SEQ ID NO:217; and (ii) a VL having an amino acid sequence of SEQ ID NO:20;
[0869] (i) a VH having an amino acid sequence of SEQ ID NO:225; and (ii) a VL having an amino acid sequence of SEQ ID NO:20;
[0870] (i) a VH having an amino acid sequence of SEQ ID NO:233; and (ii) a VL having an amino acid sequence of SEQ ID NO:20; and
[0871] (i) a VH having an amino acid sequence of SEQ ID NO:241; and (ii) a VL having an amino acid sequence of SEQ ID NO:20;
[0872] (i) a VH having an amino acid sequence of SEQ ID NO:249; and (ii) a VL having an amino acid sequence of SEQ ID NO:20;
[0873] (i) a VH having an amino acid sequence of SEQ ID NO:257; and (ii) a VL having an amino acid sequence of SEQ ID NO:20;
[0874] (i) a VH having an amino acid sequence of SEQ ID NO:265; and (ii) a VL having an amino acid sequence of SEQ ID NO:20;
[0875] (i) a VH having an amino acid sequence of SEQ ID NO:273; and (ii) a VL having an amino acid sequence of SEQ ID NO:20;
[0876] (i) a VH having an amino acid sequence of SEQ ID NO:281; and (ii) a VL having an amino acid sequence of SEQ ID NO:20;
[0877] (i) a VH having an amino acid sequence of SEQ ID NO:289; and (ii) a VL having an amino acid sequence of SEQ ID NO:20;
[0878] (i) a VH having an amino acid sequence of SEQ ID NO:297; and (ii) a VL having an amino acid sequence of SEQ ID NO:20;
[0879] (i) a VH having an amino acid sequence of SEQ ID NO:305; and (ii) a VL having an amino acid sequence of SEQ ID NO:20;
[0880] (i) a VH having an amino acid sequence of SEQ ID NO:313; and (ii) a VL having an amino acid sequence of SEQ ID NO:20;
[0881] (i) a VH having an amino acid sequence of SEQ ID NO:321; and (ii) a VL having an amino acid sequence of SEQ ID NO:20;
[0882] (i) a VH having an amino acid sequence of SEQ ID NO:329; and (ii) a VL having an amino acid sequence of SEQ ID NO:20; and
[0883] (i) a VH having an amino acid sequence of SEQ ID NO:337; and (ii) a VL having an amino acid sequence of SEQ ID NO:20. (FIGS. 24, and 41-74).

[0884] In certain embodiments, the anti-CD28 ABD is capable of binding to CD28, as measured by at least one of a Biacore, surface plasmon resonance (SPR) and/or BLI (biolayer interferometry, e.g., Octet assay) assay, with the latter finding particular use in many embodiments. In particular embodiments, the CD28 ABD is capable of binding to human and cynomolgus CD28.

[0885] In some embodiments, the CD28 ABD includes a variable heavy domain that is at least 90, 95, 97, 98 or 99% identical to one of the following CD28 ABD variable heavy domains: SEQ ID NOs:89, 97, 105, 113, 121, 129, 137, 145, 153, 161, 169, 177, 185, 193, 201, 209, 217, 225, 233, 241, 249, 257, 265, 273, 281, 289, 297, 305, 313, 321, 329, and 337. In some embodiments, the CD28 ABD includes any of the variable light domains provided herein or a variant thereof.

[0886] In some embodiments, the CD28 ABD includes a variable light domain that is at least 90, 95, 97, 98 or 99% identical to one of the following CD28 ABD variable light domains: SEQ ID NOs: 20, 93, 101, 109, 117, 125, 133, 141, 149, 157, 165, 173, 181, 189, 197, 205, 213, 221, 229, 237, 245, 253, 261, 269, 277, 285, 293, 301, 309, 317, 325, 333 and, 341. In some embodiments, the CD28 ABD includes any of the variable heavy domains provided herein or a variant thereof.

[0887] In some embodiments, the CD28 ABDs have variable heavy and variable light domains that are 90, 95, 97, 98 or 99% identical to the VH and/or VL domains of a CD28 ABD as described herein, but the CDRs are identical. In some embodiments, the VH selected from the group consisting of: SEQ ID NOs:89, 97, 105, 113, 121, 129, 137, 145, 153, 161, 169, 177, 185, 193, 201, 209, 217, 225, 233, 241, 249, 257, 265, 273, 281, 289, 297, 305, 313, 321, 329, and 337. In some embodiments, the VL is selected from the group consisting of: SEQ ID NOs: 20, 93, 101, 109, 117, 125, 133, 141, 149, 157, 165, 173, 181, 189, 197, 205, 213, 221, 229, 237, 245, 253, 261, 269, 277, 285, 293, 301, 309, 317, 325, 333 and, 341.

[0888] In some embodiments, the CD28 ABDs have variable heavy and variable light domains that are 90, 95, 97, 98 or 99% identical to the VH and/or VL domains of a CD28 ABD as described herein, and there can be from 0 to 6 amino acid modifications in the CDRs. In some embodiments, the VH selected from the group consisting of: SEQ ID NOs:89, 97, 105, 113, 121, 129, 137, 145, 153, 161, 169, 177, 185, 193, 201, 209, 217, 225, 233, 241, 249, 257, 265, 273, 281, 289, 297, 305, 313, 321, 329, and 337. In some embodiments, the VL is selected from the group consisting of: SEQ ID NOs: 20, 93, 101, 109, 117, 125, 133, 141, 149, 157, 165, 173, 181, 189, 197, 205, 213, 221, 229, 237, 245, 253, 261, 269, 277, 285, 293, 301, 309, 317, 325, 333 and, 341.

[0889] In some embodiments, the CD28 ABDs have variable heavy and variable light domains that are 90, 95, 97, 98 or 99% identical to the VH and/or VL domains of a CD28 ABD as described herein, and there can be from 0 to 6 amino acid modifications in the CDRs, with no CDR having more than 1 amino acid modification. In some embodiments, the VH selected from the group consisting of: SEQ ID NOs:89, 97, 105, 113, 121, 129, 137, 145, 153, 161, 169, 177, 185, 193, 201, 209, 217, 225, 233, 241, 249, 257, 265, 273, 281, 289, 297, 305, 313, 321, 329, and 337. In some embodiments, the VL is selected from the group consisting of: SEQ ID NOs: 20, 93, 101, 109, 117, 125, 133, 141, 149, 157, 165, 173, 181, 189, 197, 205, 213, 221, 229, 237, 245, 253, 261, 269, 277, 285, 293, 301, 309, 317, 325, 333 and, 341.

[0890] In certain embodiments, the CD28 ABD is capable of binding to the CD28, as measured by at least one of a Biacore, surface plasmon resonance (SPR) and/or BLI (biolayer interferometry, e.g., Octet assay) assay, with the latter finding particular use in many embodiments. In particular embodiments, the CD28 ABD is capable of binding human CD28 (see FIG. 2) at detectable limits of the assay.

[0891] Such CD28 binding domains can be included in any of the antibodies provided herein including, for example, the bispecific and trispecific antibody formats provided in FIGS. 82 and 83.

[0892] 1. Additional CD28 Binding Domains

[0893] In another aspect, provided herein are additional CD28 binding domains that can be used in anti-CD28 antibodies including any of the anti-CD28 antibodies described herein. In some embodiments, the anti-CD28 binding domain includes a variable heavy domain selected from any of those in FIG. 163 (SEQ ID NOs:3354-3389) or a variant thereof, and a common light chain with a variable light domain referred to as “IGKV1-39_L1” (also referred to as, “2A3A4.248[PDL1]_L1” (SEQ ID NO:3239, see FIG. 161A) and “1F12A4.249[PDL2]_L1” (SEQ ID NO:3271, see FIG. 162A)) or variant thereof, wherein common light chain can also be used as a light chain for a PD-L1 and/or PD-L2 binding domain. In some embodiments, the anti-CD28 antibodies provided herein (e.g., anti-CD28×anti-PD-L1, and anti-CD28×anti-PD-L2 antibodies, and anti-CD28×anti-PD-L1×anti-PDL2 trispecific) includes a CD28 binding domain that includes a common light chain with the IGKV1-39_L1 variable light domain. In some embodiments, the anti-CD28 antibody is an anti-CD28×anti-PD-L1 antibody having a CD28 binding domain and a PD-L1 binding domain that each include a common light chain with the IGKV1-39_L1 variable light domain (SEQ ID NO:3239). In some embodiments, the anti-CD28 antibody is an anti-CD28×anti-PD-L2 antibody having a CD28 binding domain and a PD-L2 binding domain that each include a common light chain with the IGKV1-39_L1 variable light domain (SEQ ID NO:3239). In some embodiments, the anti-CD28 antibody is an anti-CD28×anti-PD-L1×anti-PD-L2 antibody having a CD28 binding domain, a PD-L1 binding domain, and a PD-L2 binding domain that each include a common light chain with the IGKV1-39_L1 variable light domain (SEQ ID NO:3239). Such CD28 binding domains that utilize a common light chain with the IGKV1-39_L1 variable light domain (SEQ ID NO:3239) can be used, for example, in any of the antibody formats provided herein that utilize a common light chain (see, e.g., 1+1 CLC, 2+1 CLC, 1+1+1 stackFab2-scFv-Fc, 1+1+1 Fab-(Fab-scFv)-Fc, 1+1+1 mAb-scFv, and 1+1+1 stackFab2-Fab-Fc formats disclosed herein, FIGS. 82 and 83).

[0894] In one embodiment, the CD28 antigen binding domain includes the vhCDR1-3 of any of the CD28 variable heavy domains depicted in FIG. 163 (SEQ ID NOs:3354-3389), and the vlCDR1-3 of the IGK1-39_L1 variable light domain (SEQ ID NO:3239).

[0895] In one embodiment, the CD28 ABD of the subject anti-CD28 antibodies described herein includes a) a vhCDR1, vhCDR2, and/or vhCDR3 with 1, 2, 3, 4, 5, 6, 7, 8, 9, 10 amino acid modifications as compared to the vhCDR1, vhCDR2, and/or vhCDR3 of one of the CD28 variable heavy domains depicted in FIG. 163 (SEQ ID NOs:3354-3389), respectively, and/or b) a vlCDR1, vlCDR2, and/or vlCDR3 with 1, 2, 3, 4, 5, 6, 7, 8, 9, 10 amino acid modifications as compared to the vlCDR1, vlCDR2, and/or vlCDR3 of the IGK1-39_L1 variable light domain (SEQ ID NO:3239), respectively. In certain embodiments, the CD28 ABD of the subject anti-CD28 antibody is capable of binding CD28 antigen, as measured by at least one of a Biacore, surface plasmon resonance (SPR), flow cytometry, and/or BLI (biolayer interferometry, e.g., Octet assay) assay, with the latter finding particular use in many embodiments. In particular embodiments, the CD28 ABD is capable of binding human CD28 antigen (see FIG. 3).

[0896] In one embodiment, the CD28 ABD of the subject anti-CD28 antibody includes a vhCDR1, vhCDR2, and/or vhCDR3 that is at least 90, 95, 97, 98 or 99% identical to the vhCDR1, vhCDR2, and/or vhCDR3 of one of the CD28 variable heavy domains depicted in FIG. 163 (SEQ ID NOs:3354-3389), respectively, and/or a vlCDR1, vlCDR2, and/or vlCDR3 that is at least 90, 95, 97, 98 or 99% identical to the vlCDR1, vlCDR2, and/or vlCDR3 of the IGK1-39_L1 variable light domain (SEQ ID NO:3239), respectively. In certain embodiments, the CD28 ABD is capable of binding to the CD28, as measured by at least one of a Biacore, surface plasmon resonance (SPR), flow cytometry, and/or BLI (biolayer interferometry, e.g., Octet assay) assay, with the latter finding particular use in many embodiments. In particular embodiments, the CD28 ABD is capable of binding human CD28 antigen (see FIG. 3).

[0897] In another exemplary embodiment, the CD28 ABD of the subject anti-CD28 antibody includes the variable heavy (VH) domain of one of the CD28 variable heavy domains depicted in FIG. 163 (SEQ ID NOs:3354-3389), and the IGK1-39_L1 variable light domain (SEQ ID NO:3239).

[0898] In some embodiments, the anti-CD28 antibody includes a CD28 ABD that includes a variable heavy domain that is a variant of one of the CD28 variable heavy domains depicted in FIG. 163 (SEQ ID NOs:3354-3389), and/or a variable light domain that is a variant of the IGK1-39_L1 variable light domain (SEQ ID NO:3239). In some embodiments, the variant VH domain has from 1, 2, 3, 4, 5, 6, 7, 8, 9 or 10 amino acid changes compared to one of the CD28 variable heavy domains depicted in FIG. 163 (SEQ ID NOs:3354-3389) and/or the variable light domain has from 1, 2, 3, 4, 5, 6, 7, 8, 9 or 10 amino acid changes from the IGK1-39_L1 variable light domain (SEQ ID NO:3239). In some embodiments, the one or more amino acid changes are in the VH and/or VL framework regions (FR1, FR2, FR3, and/or FR4). In some embodiments, the one or more amino acid change(s) are in one or more CDRs. In certain embodiments, the CD28 ABD is capable of binding to CD28, as measured by at least one of a Biacore, surface plasmon resonance (SPR), flow cytometry, and/or BLI (biolayer interferometry, e.g., Octet assay) assay, with the latter finding particular use in many embodiments. In particular embodiments, the CD28 ABD is capable of binding human CD28 antigen (see FIG. 3).

[0899] In one embodiment, the variant VH domain is at least 90, 95, 97, 98 or 99% identical to one of the CD28 variable heavy domains depicted in FIG. 163 (SEQ ID NOs:3354-3389) and/or the variable light domain is at least 90, 95, 97, 98 or 99% identical to the IGK1-39_L1 variable light domain (SEQ ID NO:3239). In certain embodiments, the CD28 ABD is capable of binding to CD28, as measured by at least one of a Biacore, surface plasmon resonance (SPR), flow cytometry, and/or BLI (biolayer interferometry, e.g., Octet assay) assay, with the latter finding particular use in many embodiments. In particular embodiments, the CD28 ABD is capable of binding human CD28 antigen (see FIG. 3).

[0900] In some embodiments, the CD28 binding domain includes a VH that includes any one of the VHCDR1-3 and/or HFR1-4 sequences depicted in FIG. 163C (SEQ ID NOs:3390-3393 and 25674-2676) and the IGK1-39_L1 variable light domain (SEQ ID NO:3239) or a variant thereof.

[0901] In another embodiments, CD28 binding domains includes a variable heavy domain selected from any of those in FIG. 163 (SEQ ID NOs:3354-3389) or a variant thereof, and a variable light domain selected from those in FIG. 35 or 37 or a variant thereof.

[0902] In one embodiment, the CD28 ABD of the subject anti-CD28 antibodies described herein includes a) a vhCDR1, vhCDR2, and/or vhCDR3 with 1, 2, 3, 4, 5, 6, 7, 8, 9, 10 amino acid modifications as compared to the vhCDR1, vhCDR2, and/or vhCDR3 of one of the CD28 variable heavy domains depicted in FIG. 163 (SEQ ID NOs:3354-3389), respectively, and/or b) a vlCDR1, vlCDR2, and/or vlCDR3 with 1, 2, 3, 4, 5, 6, 7, 8, 9, 10 amino acid modifications as compared to the vlCDR1, vlCDR2, and/or vlCDR3 of a variable light domain selected from those in FIG. 35 or 37, respectively. In certain embodiments, the CD28 ABD of the subject anti-CD28 antibody is capable of binding CD28 antigen, as measured by at least one of a Biacore, surface plasmon resonance (SPR), flow cytometry, and/or BLI (biolayer interferometry, e.g., Octet assay) assay, with the latter finding particular use in many embodiments. In particular embodiments, the CD28 ABD is capable of binding human CD28 antigen (see FIG. 3).

[0903] In one embodiment, the CD28 ABD of the subject anti-CD28 antibody includes a vhCDR1, vhCDR2, and/or vhCDR3 that is at least 90, 95, 97, 98 or 99% identical to the vhCDR1, vhCDR2, and/or vhCDR3 of one of the CD28 variable heavy domains depicted in FIG. 163 (SEQ ID NOs:3354-3389), respectively, and/or a vlCDR1, vlCDR2, and/or vlCDR3 that is at least 90, 95, 97, 98 or 99% identical to the vlCDR1, vlCDR2, and/or vlCDR3 of a variable light domain selected from those in FIG. 35 or 37, respectively. In certain embodiments, the CD28 ABD is capable of binding to the CD28, as measured by at least one of a Biacore, surface plasmon resonance (SPR), flow cytometry, and/or BLI (biolayer interferometry, e.g., Octet assay) assay, with the latter finding particular use in many embodiments. In particular embodiments, the CD28 ABD is capable of binding human CD28 antigen (see FIG. 3).

[0904] In another exemplary embodiment, the CD28 ABD of the subject anti-CD28 antibody includes the variable heavy (VH) domain of one of the CD28 variable heavy domains depicted in FIG. 163 (SEQ ID NOs:3354-3389), and a variable light domain selected from those in FIG. 35 or 37.

[0905] In some embodiments, the anti-CD28 antibody includes a CD28 ABD that includes a variable heavy domain that is a variant of one of the CD28 variable heavy domains depicted in FIG. 163 (SEQ ID NOs:3354-3389), and/or a variable light domain that is a variant of a variable light domain selected from those in FIG. 35 or 37. In some embodiments, the variant VH domain has from 1, 2, 3, 4, 5, 6, 7, 8, 9 or 10 amino acid changes compared to one of the CD28 variable heavy domains depicted in FIG. 163 (SEQ ID NOs:3354-3389) and/or the variable light domain has from 1, 2, 3, 4, 5, 6, 7, 8, 9 or 10 amino acid changes from a variable light domain selected from those in FIG. 35 or 37. In some embodiments, the one or more amino acid changes are in the VH and/or VL framework regions (FR1, FR2, FR3, and/or FR4). In some embodiments, the one or more amino acid change(s) are in one or more CDRs. In certain embodiments, the CD28 ABD is capable of binding to CD28, as measured by at least one of a Biacore, surface plasmon resonance (SPR), flow cytometry, and/or BLI (biolayer interferometry, e.g., Octet assay) assay, with the latter finding particular use in many embodiments. In particular embodiments, the CD28 ABD is capable of binding human CD28 antigen (see FIG. 3).

[0906] In one embodiment, the variant VH domain is at least 90, 95, 97, 98 or 99% identical to one of the CD28 variable heavy domains depicted in FIG. 163 (SEQ ID NOs:3354-3389) and/or the variable light domain is at least 90, 95, 97, 98 or 99% identical to a variable light domain selected from those in FIG. 35 or 37. In certain embodiments, the CD28 ABD is capable of binding to CD28, as measured by at least one of a Biacore, surface plasmon resonance (SPR), flow cytometry, and/or BLI (biolayer interferometry, e.g., Octet assay) assay, with the latter finding particular use in many embodiments. In particular embodiments, the CD28 ABD is capable of binding human CD28 antigen (see FIG. 1).

[0907] In another aspect, provided herein is a CD28 binding domain that competes with any of the PD-L1 binding domains disclosed herein for binding to human CD28.

### V. Antibodies

[0908] In one aspect provided herein are anti-CD28 antibodies and anti-PD-L1 antibodies. Antibodies provided herein can include any of the PD-L1, PD-L2, and/or CD28 binding domains provided herein (e.g., the antibody formats described in Section V.F. and FIGS. 82 and 83).

[0909] The antibodies provided herein include different antibody domains. As described herein and known in the art, the antibodies described herein include different domains within the heavy and light chains, which can be overlapping as well. These domains include, but are not limited to, the Fc domain, the CH1 domain, the CH2 domain, the CH3 domain, the hinge domain, the heavy constant domain (CH1-hinge-Fc domain or CH1-hinge-CH2-CH3), the variable heavy domain, the variable light domain, the light constant domain, Fab domains and scFv domains.

[0910] As shown herein, there are a number of suitable linkers (for use as either domain linkers or scFv linkers) that can be used to covalently attach the recited domains (e.g., scFvs, Fabs, Fc domains, etc.), including traditional peptide bonds, generated by recombinant techniques. Exemplary linkers to attach domains of the subject antibody to each other are depicted in FIG. 7. In some embodiments, the linker peptide may predominantly include the following amino acid residues: Gly, Ser, Ala, or Thr. The linker peptide should have a length that is adequate to link two molecules in such a way that they assume the correct conformation relative to one another so that they retain the desired activity. In one embodiment, the linker is from about 1 to 50 amino acids in length, preferably about 1 to 30 amino acids in length. In one embodiment, linkers of 1 to 20 amino acids in length may be used, with from about 5 to about 10 amino acids finding use in some embodiments. Useful linkers include glycine-serine polymers, including for example (GS)n, (GSGGS)n, (GGGGS)n, and (GGGS)n, where n is an integer of at least one (and generally from 3 to 4), glycine-alanine polymers, alanine-serine polymers, and other flexible linkers. Alternatively, a variety of nonproteinaceous polymers, including but not limited to polyethylene glycol (PEG), polypropylene glycol, polyoxyalkylenes, or copolymers of polyethylene glycol and polypropylene glycol, may find use as linkers.

[0911] Other linker sequences may include any sequence of any length of CL/CH1 domain but not all residues of CL/CH1 domain; for example the first 5-12 amino acid residues of the CL/CH1 domains. Linkers can be derived from immunoglobulin light chain, for example Cκ or Cλ. Linkers can be derived from immunoglobulin heavy chains of any isotype, including for example Cγ1, Cγ2, Cγ3, Cγ4, Cα1, Cα2, Cδ, Cε, and Cμ. Linker sequences may also be derived from other proteins such as Ig-like proteins (e.g., TCR, FcR, KIR), hinge region-derived sequences, and other natural sequences from other proteins.

[0912] In some embodiments, the linker is a “domain linker”, used to link any two domains as outlined herein together. For example, in the 2+1 Fab₂-scFv-Fc format, there may be a domain linker that attaches the C-terminus of the CH1 domain of the Fab to the N-terminus of the scFv, with another optional domain linker attaching the C-terminus of the scFv to the CH2 domain (although in many embodiments the hinge is used as this domain linker). While any suitable linker can be used, many embodiments utilize a glycine-serine polymer as the domain linker, including for example (GS)n, (GSGGS)n, (GGGGS)n, and (GGGS)n, where n is an integer of at least one (and generally from 3 to 4 to 5) as well as any peptide sequence that allows for recombinant attachment of the two domains with sufficient length and flexibility to allow each domain to retain its biological function. In some cases, and with attention being paid to “strandedness”, as outlined below, charged domain linkers, as used in some embodiments of scFv linkers can be used. Exemplary useful domain linkers are depicted in FIG. 8.

[0913] In some embodiments, the linker is a scFv linker that is used to covalently attach the VH and VL domains as discussed herein. In many cases, the scFv linker is a charged scFv linker, a number of which are shown in FIG. 7. Accordingly, provided herein are charged scFv linkers, to facilitate the separation in pI between a first and a second monomer. That is, by incorporating a charged scFv linker, either positive or negative (or both, in the case of scaffolds that use scFvs on different monomers), this allows the monomer comprising the charged linker to alter the pI without making further changes in the Fc domains. These charged linkers can be substituted into any scFv containing standard linkers. Again, as will be appreciated by those in the art, charged scFv linkers are used on the correct “strand” or monomer, according to the desired changes in pI. For example, as discussed herein, to make 1+1 Fab-scFv-Fc format heterodimeric antibody, the original pI of the Fv region for each of the desired antigen binding domains are calculated, and one is chosen to make an scFv, and depending on the pI, either positive or negative linkers are chosen.

[0914] Charged domain linkers can also be used to increase the pI separation of the monomers of the invention as well, and thus those included in FIG. 6 can be used in any embodiment herein where a linker is utilized.

[0915] The PD-L1 binding domains, PD-L2 binding domains, and CD28 binding domains provided can be included in any useful antibody format including, for example, canonical immunoglobulin, as well as the formats provided herein (see, e.g., Section V.F. and FIGS. 82 and 83).

[0916] In some embodiments, the subject antibody includes one or more of the PD-L1 and/or PD-L2 ABDs provided herein. In some embodiments, the antibody includes one PD-L1 ABD. In other embodiments, the antibody includes two PD-L1 ABDs. In some embodiments, the antibody includes one PD-L2 ABD. In other embodiments, the antibody includes two PD-L2 ABDs. In exemplary embodiments, the antibody includes one PD-L1 ABD and one PD-L2 ABD.

[0917] In an exemplary embodiment, the antibody is a bispecific or trispecific antibody that includes one or two PD-L1 ABDs, including any of the PD-L1 ABDs provided herein. In an exemplary embodiment, the antibody is a bispecific or trispecific antibody that includes one or two PD-L2 ABDs, including any of the PD-L2 ABDs provided herein. Bispecific and trispecific antibody that include such PD-L1 and PD-L2 ABDs include, for example, “1+1 Fab-scFv-Fc,” “2+1 Fab₂-scFv-Fc,” “2+1 mAb-scFv,” “1+1 common light chain,” “2+1 common light chain,” “1+1+1 stackFab₂-scFv-Fc,” “1+1+1 Fab-(Fab-scFv)-Fc,” “1+1+1 mAb-scFv,” and, “1+1+1 stackFab₂-Fab-Fc” format antibodies (See FIGS. 82 and 83).

[0918] In exemplary embodiments, the PD-L1 ABD includes a VH and VL selected from those in FIGS. 17, 19, 20, 21, 24-26, and 28 or a variant thereof. In some embodiments, such bispecific and trispecific antibodies are heterodimeric bispecific antibodies that include any of the heterodimerization skew variants, pI variants and/or ablation variants described herein. See FIG. 9. In some embodiments, the PD-L1 ABD includes a VH and VL selected from the following:
[0919] i) a variable heavy domain of any of the PD-L1 variable heavy domains in FIGS. 17 and 19, and a variable light domain of any of the PD-L1 variable light domains in FIGS. 17 and 20,
[0920] ii) a variable heavy domain and variable light domain of any of the PD-L1 binding domains in FIGS. 17 and 21,
[0921] iii) a variable heavy domain of any of the PD-L1 binding domains in FIGS. 25 and 26, and a variable light domain of any of the PD-L1 binding domains in FIGS. 25 and 26,
[0922] iv) a variable heavy domain and variable light domain of any of the PD-L1 binding domains in FIGS. 25 and 26,
[0923] v) a variable heavy domain of any of the PD-L1 binding domains in FIGS. 25 and 26, and a variable light domain having the amino acid sequence of SEQ ID NO:20 (FIG. 24), and
[0924] vi) a variable heavy domain and variable light domain of any of the PD-L1 binding domains in FIG. 28.

[0925] In exemplary embodiments, the PD-L2 ABD includes a VH and VL selected from those in FIGS. 24, 29-32 and 34 or a variant thereof. In some embodiments, such bispecific and trispecific antibodies are heterodimeric bispecific antibodies that include any of the heterodimerization skew variants, pI variants and/or ablation variants described herein. See FIG. 9. In some embodiments, the PD-L2 ABD includes a VH and VL selected from the following:
[0926] i) a variable heavy domain of any of the PD-L2 binding domains in FIGS. 29-32, and a variable light domain of any of the PD-L2 binding domains in FIGS. 29-32,
[0927] ii) a variable heavy domain and variable light domain of any of the PD-L2 binding domains in FIGS. 29-32,
[0928] iii) a variable heavy domain of any of the PD-L2 binding domains in FIGS. 29-32, and a variable light domain having the amino acid sequence of SEQ ID NO:20 (FIG. 24), and
[0929] iv) a variable heavy domain and variable light domain of any of the PD-L2 binding domains in FIG. 34.

[0930] In some embodiments, the subject antibody includes one or more of the CD28 ABDs provided herein. In some embodiments, the antibody includes one CD28 ABD. In other embodiments, the antibody includes two CD28 ABDs. In exemplary embodiments, the antibody includes a CD28 ABD having a VH and VL selected from those depicted in FIGS. 35, 37, 38, 41-74 and 81 or a variant thereof. In exemplary embodiments, the CD28 ABD includes a variable heavy domain and variable light domain selected from the following:
[0931] i) a variable heavy domain of any of the CD28 binding domains in FIGS. 35, 36, and 38, and a variable light domain of any of the CD28 binding domains in FIGS. 35, 37, and 38,
[0932] ii) a variable heavy domain and a variable light domain of any of the CD28 binding domains in FIG. 38,
[0933] iii) a variable heavy domain of any of the CD28 binding domains in FIGS. 41-74, and a variable light domain of any of the CD28 binding domains in FIGS. 41-74,
[0934] iv) a variable heavy domain and variable light domain of any of the CD28 binding domains in FIGS. 41-74,
[0935] v) a variable heavy domain of any of the CD28 binding domains in FIGS. 41-74, and a variable light domain having the amino acid sequence of SEQ ID NO:20 (FIG. 24), and
[0936] vi) a variable heavy domain and variable light domain of any of the CD28 binding domains in FIG. 81.

### A. Chimeric and Humanized Antibodies

[0937] In certain embodiments, the subject antibodies provided herein include a heavy chain variable region from a particular germline heavy chain immunoglobulin gene and/or a light chain variable region from a particular germline light chain immunoglobulin gene. For example, such antibodies may comprise or consist of a human antibody comprising heavy or light chain variable regions that are “the product of” or “derived from” a particular germline sequence. A human antibody that is “the product of” or “derived from” a human germline immunoglobulin sequence can be identified as such by comparing the amino acid sequence of the human antibody to the amino acid sequences of human germline immunoglobulins and selecting the human germline immunoglobulin sequence that is closest in sequence (i.e., greatest % identity) to the sequence of the human antibody (using the methods outlined herein). A human antibody that is “the product of” or “derived from” a particular human germline immunoglobulin sequence may contain amino acid differences as compared to the germline sequence, due to, for example, naturally-occurring somatic mutations or intentional introduction of site-directed mutation. However, a humanized antibody typically is at least 90% identical in amino acids sequence to an amino acid sequence encoded by a human germline immunoglobulin gene and contains amino acid residues that identify the antibody as being derived from human sequences when compared to the germline immunoglobulin amino acid sequences of other species (e.g., murine germline sequences). In certain cases, a humanized antibody may be at least 95, 96, 97, 98 or 99%, or even at least 96%, 97%, 98%, or 99% identical in amino acid sequence to the amino acid sequence encoded by the germline immunoglobulin gene. Typically, a humanized antibody derived from a particular human germline sequence will display no more than 10-20 amino acid differences from the amino acid sequence encoded by the human germline immunoglobulin gene (prior to the introduction of any skew, pI and ablation variants herein; that is, the number of variants is generally low, prior to the introduction of the variants of the invention). In certain cases, the humanized antibody may display no more than 5, or even no more than 4, 3, 2, or 1 amino acid difference from the amino acid sequence encoded by the germline immunoglobulin gene (again, prior to the introduction of any skew, pI and ablation variants herein; that is, the number of variants is generally low, prior to the introduction of the variants of the invention).

[0938] In one embodiment, the parent antibody has been affinity matured, as is known in the art. Structure-based methods may be employed for humanization and affinity maturation, for example as described in U.S. Ser. No. 11/004,590. Selection based methods may be employed to humanize and/or affinity mature antibody variable regions, including but not limited to methods described in Wu et al., 1999, J. Mol. Biol. 294:151-162; Baca et al., 1997, J. Biol. Chem. 272(16):10678-10684; Rosok et al., 1996, J. Biol. Chem. 271(37): 22611-22618; Rader et al., 1998, Proc. Natl. Acad. Sci. USA 95: 8910-8915; Krauss et al., 2003, Protein Engineering 16(10):753-759, all entirely incorporated by reference. Other humanization methods may involve the grafting of only parts of the CDRs, including but not limited to methods described in U.S. Ser. No. 09/810,510; Tan et al., 2002, J. Immunol. 169:1119-1125; De Pascalis et al., 2002, J. Immunol. 169:3076-3084, all entirely incorporated by reference.

### B. Anti-CD28, Anti-PD-L1, and Anti-PD-L2 Bispecific and Trispecific Antibodies

[0939] In another aspect, provided herein are anti-CD28×anti-PD-L1, and anti-CD28×anti-PD-L2 antibodies, and anti-CD28×anti-PD-L1×anti-PDL2 trispecific. In some embodiments, the bispecific and trispecific antibodies provided herein includes an agonistic CD28 binding domain that provides co-stimulatory function by binding to CD28 on T cells. As such, the bispecific and trispecific antibodies provided herein enhance immune responses selectively at tumor sites that express PD-L1 and/or PD-L2. In some embodiments, the anti-CD28×anti-PD-L1 and CD28×anti-PD-L2 antibodies are bispecific antibodies. In some embodiments, the anti-CD28×anti-PD-L1×anti-PD-L2 antibody is a trispecific antibody. In some embodiments, the anti-CD28×anti-PD-L1 and CD28×anti-PD-L2 antibodies are bivalent antibodies. In some embodiments, the anti-CD28×anti-PD-L1 and CD28×anti-PD-L2 antibodies are trivalent antibodies. In some embodiments, the anti-CD28×anti-PD-L1 and CD28×anti-PD-L2 antibodies are bispecific, bivalent antibody. In exemplary embodiments, the anti-CD28×anti-PD-L1 and CD28×anti-PD-L2 antibodies are bispecific, trivalent antibodies. In some embodiments, the anti-CD28×anti-PD-L1×anti-PD-L2 antibody is a trispecific, trivalent antibody.

[0940] As is more fully outlined herein, the anti-CD28×anti-PD-L1 antibody can be in a variety of formats, as outlined below. Exemplary formats include the “1+1 Fab-scFv-Fc,” “2+1 Fab₂-scFv-Fc,” “2+1 mAb-scFv,” “1+1 common light chain,” “2+1 common light chain,” “1+1+1 stackFab₂-scFv-Fc,” “1+1+1 Fab-(Fab-scFv)-Fc,” “1+1+1 mAb-scFv,” and, “1+1+1 stackFab₂-Fab-Fc” format antibodies (See FIGS. 82 and 83). Other useful antibody formats include, but are not limited to, “mAb-Fv,” “mAb-scFv,” “central-Fv”, “one armed scFv-mAb,” “scFv-mAb,” “dual scFv,” and “trident” format antibodies, as disclosed in US20180127501A1, which is incorporated by reference herein, particularly in pertinent part relating to antibody formats (see, e.g., FIG. 2).

[0941] The can include any suitable CD28 ABD, including those described herein. In some embodiments, the CD28 ABD is an agonistic ABD that provides co-stimulatory function upon binding to CD28. In some embodiments, the subject antibody includes a CD28 binding domain that includes one of the following variable heavy domain and variable light domains or a variant thereof:
[0942] i) a variable heavy domain of any of the PD-L1 variable heavy domains in FIGS. 17 and 19, and a variable light domain of any of the PD-L1 variable light domains in FIGS. 17 and 20,
[0943] ii) a variable heavy domain and variable light domain of any of the PD-L1 binding domains in FIGS. 17 and 21,
[0944] iii) a variable heavy domain of any of the PD-L1 binding domains in FIGS. 25 and 26, and a variable light domain of any of the PD-L1 binding domains in FIGS. 25 and 26,
[0945] iv) a variable heavy domain and variable light domain of any of the PD-L1 binding domains in FIGS. 25 and 26,
[0946] v) a variable heavy domain of any of the PD-L1 binding domains in FIGS. 25 and 26, and a variable light domain having the amino acid sequence of SEQ ID NO:20 (FIG. 24),
[0947] vi) a variable heavy domain and variable light domain of any of the PD-L1 binding domains in FIG. 28,
[0948] vii) a variable heavy domain of any of the PD-L2 binding domains in FIGS. 29-32, and a variable light domain of any of the PD-L2 binding domains in FIGS. 29-32,
[0949] viii) a variable heavy domain and variable light domain of any of the PD-L2 binding domains in FIGS. 29-32,
[0950] ix) a variable heavy domain of any of the PD-L2 binding domains in FIGS. 29-32, and a variable light domain having the amino acid sequence of SEQ ID NO:20 (FIG. 24), and
[0951] x) a variable heavy domain and variable light domain of any of the PD-L2 binding domains in FIG. 34.

[0952] The anti-CD28×anti-PD-L1 antibody provided herein can include one or more PD-L1 binding domains and/or one or more PD-L2 binding domains. In some embodiments, the subject antibody includes one PD-L1 binding domain. In certain embodiments, the subject antibody includes two PD-L1 binding domains. In some embodiments, the subject antibody includes one PD-L2 binding domain. In certain embodiments, the subject antibody includes two PD-L2 binding domains.

[0953] Note that unless specified herein, the order of the antigen list in the name does not confer structure; that is an anti-PD-L1×anti-CD28 1+1 Fab-scFv-Fc antibody can have the scFv bind to PD-L1 or CD28, although in some cases, the order specifies structure as indicated.

[0954] In addition, in embodiments wherein the subject antibody includes an scFv, the scFv can be in an orientation from N- to C-terminus of VH-scFv linker-VL or VL-scFv linker-VH. In some formats, one or more of the ABDs generally is a Fab that includes a VH domain on one protein chain (generally as a component of a heavy chain) and a VL on another protein chain (generally as a component of a light chain).

[0955] As will be appreciated by those in the art, any set of 6 CDRs or VH and VL domains can be in the scFv format or in the Fab format, which is then added to the heavy and light constant domains, where the heavy constant domains comprise variants (including within the CH1 domain as well as the Fc domain). The scFv sequences contained in the sequence listing utilize a particular charged linker, but as outlined herein, uncharged or other charged linkers can be used, including those depicted in FIG. 6.

[0956] In addition, as discussed above, the numbering used in the Sequence Listing for the identification of the CDRs is Kabat, however, different numbering can be used, which will change the amino acid sequences of the CDRs as shown in Table 2.

[0957] For all of the variable heavy and light domains listed herein, further variants can be made. As outlined herein, in some embodiments the set of 6 CDRs can have from 0, 1, 2, 3, 4 or 5 amino acid modifications (with amino acid substitutions finding particular use), as well as changes in the framework regions of the variable heavy and light domains, as long as the frameworks (excluding the CDRs) retain at least about 80, 85 or 90% identity to a human germline sequence selected from those listed in FIG. 1 of U.S. Pat. No. 7,657,380, which Figure and Legend is incorporated by reference in its entirety herein. Thus, for example, the identical CDRs as described herein can be combined with different framework sequences from human germline sequences, as long as the framework regions retain at least 80, 85 or 90% identity to a human germline sequence selected from those listed in FIG. 1 of U.S. Pat. No. 7,657,380. Alternatively, the CDRs can have amino acid modifications (e.g., from 1, 2, 3, 4 or 5 amino acid modifications in the set of CDRs (that is, the CDRs can be modified as long as the total number of changes in the set of 6 CDRs is less than 6 amino acid modifications, with any combination of CDRs being changed; e.g., there may be one change in vlCDR1, two in vhCDR2, none in vhCDR3, etc.)), as well as having framework region changes, as long as the framework regions retain at least 80, 85 or 90% identity to a human germline sequence selected from those listed in FIG. 1 of U.S. Pat. No. 7,657,380.

### C. Heterodimeric Antibodies

[0958] In exemplary embodiments, the bispecific and trispecific antibodies provided herein are heterodimeric antibodies that include two variant Fc domain sequences. Such variant Fc domains include amino acid modifications to facilitate the self-assembly and/or purification of the heterodimeric antibodies.

[0959] An ongoing problem in antibody technologies is the desire for multispecific antibodies that bind to two or more different antigens simultaneously, thus allowing the different antigens to be brought into proximity and resulting in new functionalities and new therapies. In general, these antibodies are made by including genes for each heavy and light chain into the host cells. This generally results in the formation of the desired heterodimer (A-B), as well as the two homodimers (A-A and B-B (not including the light chain heterodimeric issues)). However, a major obstacle in the formation of bispecific antibodies is the difficulty in biasing the formation of the desired heterodimeric antibody over the formation of the homodimers and/or purifying the heterodimeric antibody away from the homodimers.

[0960] There are a number of mechanisms that can be used to generate the subject heterodimeric antibodies. In addition, as will be appreciated by those in the art, these different mechanisms can be combined to ensure high heterodimerization. Amino acid modifications that facilitate the production and purification of heterodimers are collectively referred to generally as “heterodimerization variants.” As discussed below, heterodimerization variants include “skew” variants (e.g., the “knobs and holes” and the “charge pairs” variants described below) as well as “pI variants,” which allow purification of heterodimers from homodimers. As is generally described in U.S. Pat. No. 9,605,084, hereby incorporated by reference in its entirety and specifically as below for the discussion of heterodimerization variants, useful mechanisms for heterodimerization include “knobs and holes” (“KIH”) as described in U.S. Pat. No. 9,605,084, “electrostatic steering” or “charge pairs” as described in U.S. Pat. No. 9,605,084, pI variants as described in U.S. Pat. No. 9,605,084, and general additional Fc variants as outlined in U.S. Pat. No. 9,605,084 and below.

[0961] Heterodimerization variants that are useful for the formation and purification of the subject heterodimeric antibody (e.g., bispecific antibodies) are further discussed in detailed below.

[0962] 1. Skew Variants

[0963] In some embodiments, the αPD-L1 heterodimeric antibody (e.g., αPD-L1×αCD28 heterodimeric antibody) includes skew variants which are one or more amino acid modifications in a first Fc domain (A) and/or a second Fc domain (B) that favor the formation of Fc heterodimers (Fc dimers that include the first and the second Fc domain; (A-B) over Fc homodimers (Fc dimers that include two of the first Fc domain or two of the second Fc domain; A-A or B-B). Suitable skew variants are included in the FIG. 29 of US Publ. App. No. 2016/0355608, hereby incorporated by reference in its entirety and specifically for its disclosure of skew variants, as well as in FIGS. 3, 8 and 9.

[0964] One particular type of skew variants is generally referred to in the art as “knobs and holes,” referring to amino acid engineering that creates steric influences to favor heterodimeric formation and disfavor homodimeric formation, as described in U.S. Ser. No. 61/596,846, Ridgway et al., Protein Engineering 9(7):617 (1996); Atwell et al., J. Mol. Biol. 1997 270:26; U.S. Pat. No. 8,216,805, all of which are hereby incorporated by reference in their entirety and specifically for the disclosure of “knobs and holes” mutations. This is sometime referred to herein as “steric variants.” The figures identify a number of “monomer A-monomer B” pairs that rely on “knobs and holes”. In addition, as described in Merchant et al., Nature Biotech. 16:677 (1998), these “knobs and holes” mutations can be combined with disulfide bonds to further favor formation of Fc heterodimers.

[0965] Another method that finds use in the generation of heterodimers is sometimes referred to as “electrostatic steering” as described in Gunasekaran et al., J. Biol. Chem. 285(25):19637 (2010), hereby incorporated by reference in its entirety. This is sometimes referred to herein as “charge pairs”. In this embodiment, electrostatics are used to skew the formation towards heterodimerization. As those in the art will appreciate, these may also have an effect on pI, and thus on purification, and thus could in some cases also be considered pI variants. However, as these were generated to force heterodimerization and were not used as purification tools, they are classified as “skew variants”. These include, but are not limited to, D221E/P228E/L368E paired with D221R/P228R/K409R (e.g., these are “monomer corresponding sets) and C220E/P228E/368E paired with C220R/E224R/P228R/K409R.

[0966] In some embodiments, the skew variants advantageously and simultaneously favor heterodimerization based on both the “knobs and holes” mechanism as well as the “electrostatic steering” mechanism. In some embodiments, the heterodimeric antibody includes one or more sets of such heterodimerization skew variants. These variants come in “pairs” of “sets”. That is, one set of the pair is incorporated into the first monomer and the other set of the pair is incorporated into the second monomer. It should be noted that these sets do not necessarily behave as “knobs in holes” variants, with a one-to-one correspondence between a residue on one monomer and a residue on the other. That is, these pairs of sets may instead form an interface between the two monomers that encourages heterodimer formation and discourages homodimer formation, allowing the percentage of heterodimers that spontaneously form under biological conditions to be over 90%, rather than the expected 50% (25% homodimer A/A:50% heterodimer A/B:25% homodimer B/B). Exemplary heterodimerization “skew” variants are depicted in FIGS. 3, 8, and 9. In exemplary embodiments, the heterodimeric antibody includes a S364K/E357Q:L368D/K370S; L368D/K370S:S364K; L368E/K370S:S364K; T411T/E360E/Q362E:D401K; L368D/K370S:S364K/E357L; K370S:S364K/E357Q; or a T366S/L368A/Y407V:T366W (optionally including a bridging disulfide, T366S/L368A/Y407V/Y349C:T366W/S354C) “skew” variant amino acid substitution set. In an exemplary embodiment, the heterodimeric antibody includes a “S364K/E357Q:L368D/K370S” amino acid substitution set. In terms of nomenclature, the pair “S364K/E357Q:L368D/K370S” means that one of the monomers includes an Fc domain that includes the amino acid substitutions S364K and E357Q and the other monomer includes an Fc domain that includes the amino acid substitutions L368D and K370S; as above, the “strandedness” of these pairs depends on the starting pI.

[0967] In some embodiments, the skew variants provided herein can be optionally and independently incorporated with any other modifications, including, but not limited to, other skew variants (see, e.g., in FIG. 37 of US Publ. App. No. 2012/0149876, herein incorporated by reference, particularly for its disclosure of skew variants), pI variants, isotpypic variants, FcRn variants, ablation variants, etc. into one or both of the first and second Fc domains of the heterodimeric antibody. Further, individual modifications can also independently and optionally be included or excluded from the subject the heterodimeric antibody.

[0968] In some embodiments, the skew variants outlined herein can be optionally and independently incorporated with any pI variant (or other variants such as Fc variants, FcRn variants, etc.) into one or both heavy chain monomers, and can be independently and optionally included or excluded from the subject heterodimeric antibodies.

[0969] 2. pI (Isoelectric Point) Variants for Heterodimers

[0970] In some embodiments, the αPD-L1 heterodimeric antibody (e.g., αPD-L1×αCD28 heterodimeric antibody) includes purification variants that advantageously allow for the separation of heterodimeric antibody from homodimeric proteins.

[0971] There are several basic mechanisms that can lead to ease of purifying heterodimeric antibodies. For example, modifications to one or both of the antibody heavy chain monomers A and B such that each monomer has a different pI allows for the isoelectric purification of heterodimeric A-B antibody from monomeric A-A and B-B proteins. Alternatively, some scaffold formats, such as the “1+1 Fab-scFv-Fc” format, the “2+1 Fab₂-scFv-Fc” format, and the “2+1 CLC” format allows separation on the basis of size. As described above, it is also possible to “skew” the formation of heterodimers over homodimers using skew variants. Thus, a combination of heterodimerization skew variants and pI variants find particular use in the heterodimeric antibodies provided herein.

[0972] Additionally, as more fully outlined below, depending on the format of the heterodimeric antibody, pI variants either contained within the constant region and/or Fc domains of a monomer, and/or domain linkers can be used. In some embodiments, the heterodimeric antibody includes additional modifications for alternative functionalities that can also create pI changes, such as Fc, FcRn and KO variants.

[0973] In some embodiments, the subject heterodimeric antibodies provided herein include at least one monomer with one or more modifications that alter the pI of the monomer (i.e., a “pI variant”). In general, as will be appreciated by those in the art, there are two general categories of pI variants: those that increase the pI of the protein (basic changes) and those that decrease the pI of the protein (acidic changes). As described herein, all combinations of these variants can be done: one monomer may be wild type, or a variant that does not display a significantly different pI from wild-type, and the other can be either more basic or more acidic. Alternatively, each monomer is changed, one to more basic and one to more acidic.

[0974] Depending on the format of the heterodimer antibody, pI variants can be either contained within the constant and/or Fc domains of a monomer, or charged linkers, either domain linkers or scFv linkers, can be used. That is, antibody formats that utilize scFv(s) such as “1+1 Fab-scFv-Fc”, format can include charged scFv linkers (either positive or negative), that give a further pI boost for purification purposes. As will be appreciated by those in the art, some 1+1 Fab-scFv-Fc and 2+1 Fab₂-scFv-Fc formats are useful with just charged scFv linkers and no additional pI adjustments, although the invention does provide pI variants that are on one or both of the monomers, and/or charged domain linkers as well. In addition, additional amino acid engineering for alternative functionalities may also confer pI changes, such as Fc, FcRn and KO variants.

[0975] In subject heterodimeric antibodies that utilizes pI as a separation mechanism to allow the purification of heterodimeric proteins, amino acid variants are introduced into one or both of the monomer polypeptides. That is, the pI of one of the monomers (referred to herein for simplicity as “monomer A”) can be engineered away from monomer B, or both monomer A and B change be changed, with the pI of monomer A increasing and the pI of monomer B decreasing. As is outlined more fully below, the pI changes of either or both monomers can be done by removing or adding a charged residue (e.g., a neutral amino acid is replaced by a positively or negatively charged amino acid residue, e.g., glycine to glutamic acid), changing a charged residue from positive or negative to the opposite charge (aspartic acid to lysine) or changing a charged residue to a neutral residue (e.g., loss of a charge; lysine to serine). A number of these variants are shown in the FIGS. 3 and 4.

[0976] Thus, in some embodiments, the subject heterodimeric antibody includes amino acid modifications in the constant regions that alter the isoelectric point (pI) of at least one, if not both, of the monomers of a dimeric protein to form “pI antibodies”) by incorporating amino acid substitutions (“pI variants” or “pI substitutions”) into one or both of the monomers. As shown herein, the separation of the heterodimers from the two homodimers can be accomplished if the pIs of the two monomers differ by as little as 0.1 pH unit, with 0.2, 0.3, 0.4 and 0.5 or greater all finding use in the present invention.

[0977] As will be appreciated by those in the art, the number of pI variants to be included on each or both monomer(s) to get good separation will depend in part on the starting pI of the components, for example in the 1+1 Fab-scFv-Fc, 2+1 Fab₂-scFv-Fc, 1+1 CLC and 2+1 CLC formats, the starting pI of the scFv (1+1 Fab-scFv-Fc, 2+1 Fab₂-scFv-Fc) and Fab(s) of interest. That is, to determine which monomer to engineer or in which “direction” (e.g., more positive or more negative), the Fv sequences of the two target antigens are calculated and a decision is made from there. As is known in the art, different Fvs will have different starting pIs which are exploited in the present invention. In general, as outlined herein, the pIs are engineered to result in a total pI difference of each monomer of at least about 0.1 logs, with 0.2 to 0.5 being preferred as outlined herein.

[0978] In the case where pI variants are used to achieve heterodimerization, by using the constant region(s) of the heavy chain(s), a more modular approach to designing and purifying bispecific proteins, including antibodies, is provided. Thus, in some embodiments, heterodimerization variants (including skew and pI heterodimerization variants) are not included in the variable regions, such that each individual antibody must be engineered. In addition, in some embodiments, the possibility of immunogenicity resulting from the pI variants is significantly reduced by importing pI variants from different IgG isotypes such that pI is changed without introducing significant immunogenicity. Thus, an additional problem to be solved is the elucidation of low pI constant domains with high human sequence content, e.g., the minimization or avoidance of non-human residues at any particular position. Alternatively or in addition to isotypic substitutions, the possibility of immunogenicity resulting from the pI variants is significantly reduced by utilizing isosteric substitutions (e.g. Asn to Asp; and Gln to Glu).

[0979] As discussed below, a side benefit that can occur with this pI engineering is also the extension of serum half-life and increased FcRn binding. That is, as described in US Publ. App. No. US 2012/0028304 (incorporated by reference in its entirety), lowering the pI of antibody constant domains (including those found in antibodies and Fc fusions) can lead to longer serum retention in vivo. These pI variants for increased serum half-life also facilitate pI changes for purification.

[0980] In addition, it should be noted that the pI variants give an additional benefit for the analytics and quality control process of bispecific antibodies, as the ability to either eliminate, minimize and distinguish when homodimers are present is significant. Similarly, the ability to reliably test the reproducibility of the heterodimeric antibody production is important.

[0981] In general, embodiments of particular use rely on sets of variants that include skew variants, which encourage heterodimerization formation over homodimerization formation, coupled with pI variants, which increase the pI difference between the two monomers to facilitate purification of heterodimers away from homodimers.

[0982] Exemplary combinations of pI variants are shown in FIGS. 4 and 5, and FIG. 30 of US Publ. App. No. 2016/0355608, all of which are herein incorporated by reference in its entirety and specifically for the disclosure of pI variants. Preferred combinations of pI variants are shown in FIGS. 4 and 5. As outlined herein and shown in the figures, these changes are shown relative to IgG1, but all isotypes can be altered this way, as well as isotype hybrids. In the case where the heavy chain constant domain is from IgG2-4, R133E and R133Q can also be used.

[0983] In one embodiment, a preferred combination of pI variants has one monomer (the negative Fab side) comprising 208D/295E/384D/418E/421D variants (N208D/Q295E/N384D/Q418E/N421D when relative to human IgG1) and a second monomer (the positive scFv side) comprising a positively charged scFv linker, including (GKPGS)₄ (SEQ ID NO:892). However, as will be appreciated by those in the art, the first monomer includes a CH1 domain, including position 208. Accordingly, in constructs that do not include a CH1 domain (for example for antibodies that do not utilize a CH1 domain on one of the domains), a preferred negative pI variant Fc set includes 295E/384D/418E/421D variants (Q295E/N384D/Q418E/N421D when relative to human IgG1).

[0984] Accordingly, in some embodiments, one monomer has a set of substitutions from FIG. 4 and the other monomer has a charged linker (either in the form of a charged scFv linker because that monomer comprises an scFv or a charged domain linker, as the format dictates, which can be selected from those depicted in FIG. 6).

[0985] In some embodiments, modifications are made in the hinge of the Fc domain, including positions 216, 217, 218, 219, 220, 221, 222, 223, 224, 225, 226, 227, 228, 229, and 230 based on EU numbering. Thus, pI mutations and particularly substitutions can be made in one or more of positions 216-230, with 1, 2, 3, 4 or 5 mutations finding use. Again, all possible combinations are contemplated, alone or with other pI variants in other domains.

[0986] Specific substitutions that find use in lowering the pI of hinge domains include, but are not limited to, a deletion at position 221, a non-native valine or threonine at position 222, a deletion at position 223, a non-native glutamic acid at position 224, a deletion at position 225, a deletion at position 235 and a deletion or a non-native alanine at position 236. In some cases, only pI substitutions are done in the hinge domain, and in others, these substitution(s) are added to other pI variants in other domains in any combination.

[0987] In some embodiments, mutations can be made in the CH2 region, including positions 233, 234, 235, 236, 274, 296, 300, 309, 320, 322, 326, 327, 334 and 339, based on EU numbering. It should be noted that changes in 233-236 can be made to increase effector function (along with 327A) in the IgG2 backbone. Again, all possible combinations of these 14 positions can be made; e.g., an anti-CD28 or anti-PD-L1 antibody provided herein may include a variant Fc domain with 1, 2, 3, 4, 5, 6, 7, 8, 9 or 10 CH2 pI substitutions.

[0988] Specific substitutions that find use in lowering the pI of CH2 domains include, but are not limited to, a non-native glutamine or glutamic acid at position 274, a non-native phenylalanine at position 296, a non-native phenylalanine at position 300, a non-native valine at position 309, a non-native glutamic acid at position 320, a non-native glutamic acid at position 322, a non-native glutamic acid at position 326, a non-native glycine at position 327, a non-native glutamic acid at position 334, a non-native threonine at position 339, and all possible combinations within CH2 and with other domains.

[0989] In this embodiment, the modifications can be independently and optionally selected from position 355, 359, 362, 384, 389,392, 397, 418, 419, 444 and 447 (EU numbering) of the CH3 region. Specific substitutions that find use in lowering the pI of CH3 domains include, but are not limited to, a non-native glutamine or glutamic acid at position 355, a non-native serine at position 384, a non-native asparagine or glutamic acid at position 392, a non-native methionine at position 397, a non-native glutamic acid at position 419, a non-native glutamic acid at position 359, a non-native glutamic acid at position 362, a non-native glutamic acid at position 389, a non-native glutamic acid at position 418, a non-native glutamic acid at position 444, and a deletion or non-native aspartic acid at position 447.

[0990] 3. Isotypic Variants

[0991] In addition, many embodiments of the subject heterodimeric antibodies rely on the “importation” of pI amino acids at particular positions from one IgG isotype into another, thus reducing or eliminating the possibility of unwanted immunogenicity being introduced into the variants. A number of these are shown in FIG. 21 of US Publ. 2014/0370013, hereby incorporated by reference. That is, IgG1 is a common isotype for therapeutic antibodies for a variety of reasons, including high effector function. However, the heavy constant region of IgG1 has a higher pI than that of IgG2 (8.10 versus 7.31). By introducing IgG2 residues at particular positions into the IgG1 backbone, the pI of the resulting monomer is lowered (or increased) and additionally exhibits longer serum half-life. For example, IgG1 has a glycine (pI 5.97) at position 137, and IgG2 has a glutamic acid (pI 3.22); importing the glutamic acid will affect the pI of the resulting protein. As is described below, a number of amino acid substitutions are generally required to significant affect the pI of the variant antibody. However, it should be noted as discussed below that even changes in IgG2 molecules allow for increased serum half-life.

[0992] In other embodiments, non-isotypic amino acid changes are made, either to reduce the overall charge state of the resulting protein (e.g., by changing a higher pI amino acid to a lower pI amino acid), or to allow accommodations in structure for stability, etc. as is more further described below.

[0993] In addition, by pI engineering both the heavy and light constant domains, significant changes in each monomer of the heterodimer can be seen. As discussed herein, having the pIs of the two monomers differ by at least 0.5 can allow separation by ion exchange chromatography or isoelectric focusing, or other methods sensitive to isoelectric point.

[0994] 4. Calculating pI

[0995] The pI of each monomer of the antibodies provided herein can depend on the pI of the variant heavy chain constant domain and the pI of the total monomer, including the variant heavy chain constant domain and the fusion partner. Thus, in some embodiments, the change in pI is calculated on the basis of the variant heavy chain constant domain, using the chart in the FIG. 19 of US Pub. 2014/0370013. As discussed herein, which monomer to engineer is generally decided by the inherent pI of the Fv and scaffold regions. Alternatively, the pI of each monomer can be compared.

[0996] 5. pI Variants that Also Confer Better FcRn In Vivo Binding

[0997] In the case where the pI variant decreases the pI of the monomer, the pI variant can have the added benefit of improving serum retention in vivo.

[0998] Although still under examination, Fc regions are believed to have longer half-lives in vivo, because binding to FcRn at pH 6 in an endosome sequesters the Fc (Ghetie and Ward, 1997 Immunol Today. 18(12): 592-598, entirely incorporated by reference). The endosomal compartment then recycles the Fc to the cell surface. Once the compartment opens to the extracellular space, the higher pH, ˜7.4, induces the release of Fc back into the blood. In mice, Dall' Acqua et al. showed that Fc mutants with increased FcRn binding at pH 6 and pH 7.4 actually had reduced serum concentrations and the same half-life as wild-type Fc (Dall' Acqua et al. 2002, J. Immunol. 169:5171-5180, entirely incorporated by reference). The increased affinity of Fc for FcRn at pH 7.4 is thought to forbid the release of the Fc back into the blood. Therefore, the Fc mutations that will increase Fc's half-life in vivo will ideally increase FcRn binding at the lower pH while still allowing release of Fc at higher pH. The amino acid histidine changes its charge state in the pH range of 6.0 to 7.4. Therefore, it is not surprising to find His residues at important positions in the Fc/FcRn complex.

[0999] Recently it has been suggested that antibodies with variable regions that have lower isoelectric points may also have longer serum half-lives (Igawa et al., 2010 PEDS. 23(5): 385-392, entirely incorporated by reference). However, the mechanism of this is still poorly understood. Moreover, variable regions differ from antibody to antibody. Constant region variants with reduced pI and extended half-life would provide a more modular approach to improving the pharmacokinetic properties of antibodies, as described herein.

### D. Additional Fc Variants for Additional Functionality

[1000] In addition to the heterodimerization variants discussed above, there are a number of useful Fc amino acid modification that can be made for a variety of reasons, including, but not limited to, altering binding to one or more FcγR receptors, altered binding to FcRn receptors, etc., as discussed below.

[1001] Accordingly, the antibodies provided herein (heterodimeric, as well as homodimeric) can include such amino acid modifications with or without the heterodimerization variants outlined herein (e.g., the pI variants and steric variants). Each set of variants can be independently and optionally included or excluded from any particular heterodimeric protein.

[1002] 1. FcγR Variants

[1003] Accordingly, there are a number of useful Fc substitutions that can be made to alter binding to one or more of the FcγR receptors. In certain embodiments, the subject antibody includes modifications that alter the binding to one or more FcγR receptors (i.e., “FcγR variants”). Substitutions that result in increased binding as well as decreased binding can be useful. For example, it is known that increased binding to FcγRIIIa generally results in increased ADCC (antibody dependent cell-mediated cytotoxicity; the cell-mediated reaction wherein nonspecific cytotoxic cells that express FcγRs recognize bound antibody on a target cell and subsequently cause lysis of the target cell). Similarly, decreased binding to FcγRIIb (an inhibitory receptor) can be beneficial as well in some circumstances. Amino acid substitutions that find use in the subject antibodies include those listed in U.S. Pat. No. 8,188,321 (particularly FIG. 41) and U.S. Pat. No. 8,084,582, and US Publ. App. Nos. 20060235208 and 20070148170, all of which are expressly incorporated herein by reference in their entirety and specifically for the variants disclosed therein that affect Fcγ receptor binding. Particular variants that find use include, but are not limited to, 236A, 239D, 239E, 332E, 332D, 239D/332E, 267D, 267E, 328F, 267E/328F, 236A/332E, 239D/332E/330Y, 239D, 332E/330L, 243A, 243L, 264A, 264V and 299T. Such modification may be included in one or both Fc domains of the subject antibody.

[1004] In some embodiments, the subject antibody includes one or more Fc modifications that increase serum half-life. Fc substitutions that find use in increased binding to the FcRn receptor and increased serum half-life, as specifically disclosed in U.S. Ser. No. 12/341,769, hereby incorporated by reference in its entirety, including, but not limited to, 434S, 434A, 428L, 308F, 259I, 428L/434S, 259I/308F, 436I/428L, 436I or V/434S, 436V/428L and 259I/308F/428L. Such modification may be included in one or both Fc domains of the subject antibody.

[1005] 2. Ablation Variants

[1006] In some embodiments, the heterodimeric antibody (e.g., anti-PD-L1×anti-CD28 bispecific antibody) includes one or more modifications that reduce or remove the normal binding of the Fc domain to one or more or all of the Fcγ receptors (e.g., FcγR1, FcγRIIa, FcγRIIb, FcγRIIIa, etc.) to avoid additional mechanisms of action. Such modifications are referred to as “FcγR ablation variants” or “Fc knock out (FcKO or KO)” variants. In these embodiments, for some therapeutic applications, it is desirable to reduce or remove the normal binding of the Fc domain to one or more or all of the Fcγ receptors (e.g., FcγR1, FcγRIIa, FcγRIIb, FcγRIIIa, etc.) to avoid additional mechanisms of action. That is, for example, in many embodiments, particularly in the use of bispecific antibodies that bind CD28 monovalently, it is generally desirable to ablate FcγRIIIa binding to eliminate or significantly reduce ADCC activity. In some embodiments, of the subject antibodies described herein, at least one of the Fc domains comprises one or more Fcγ receptor ablation variants. In some embodiments, of the subject antibodies described herein, both of the Fc domains comprises one or more Fcγ receptor ablation variants. These ablation variants are depicted in FIG. 5, and each can be independently and optionally included or excluded, with preferred aspects utilizing ablation variants selected from the group consisting of G236R/L328R, E233P/L234V/L235A/G236del/S239K, E233P/L234V/L235A/G236del/S267K, E233P/L234V/L235A/G236del/S239K/A327G, E233P/L234V/L235A/G236del/S267K/A327G and E233P/L234V/L235A/G236del. It should be noted that the ablation variants referenced herein ablate FcγR binding but generally not FcRn binding.

[1007] As is known in the art, the Fc domain of human IgG1 has the highest binding to the Fcγ receptors, and thus ablation variants can be used when the constant domain (or Fc domain) in the backbone of the heterodimeric antibody is IgG1. Alternatively, or in addition to ablation variants in an IgG1 background, mutations at the glycosylation position 297 (generally to A or S) can significantly ablate binding to FcγRIIIa, for example. Human IgG2 and IgG4 have naturally reduced binding to the Fcγ receptors, and thus those backbones can be used with or without the ablation variants.

### E. Combination of Heterodimeric and Fc Variants

[1008] As will be appreciated by those in the art, all of the recited heterodimerization variants (including skew and/or pI variants) can be optionally and independently combined in any way, as long as they retain their “strandedness” or “monomer partition”. In addition, all of these variants can be combined into any of the heterodimerization formats.

[1009] In the case of pI variants, while embodiments finding particular use are shown in the figures, other combinations can be generated, following the basic rule of altering the pI difference between two monomers to facilitate purification.

[1010] In addition, any of the heterodimerization variants, skew and pI, are also independently and optionally combined with Fc ablation variants, Fc variants, FcRn variants, as generally outlined herein.

[1011] Exemplary combination of variants that are included in some embodiments of the subject heterodimeric antibodies are included in FIG. 9. In some embodiments, the heterodimeric antibody includes a combination of variants as depicted in FIG. 9. In certain embodiments, the antibody is a heterodimeric “1+1 Fab-scFv-Fc,” “2+1 Fab₂-scFv-Fc,” “2+1 mAb-scFv,” “1+1 common light chain,” “2+1 common light chain,” “1+1+1 stackFab₂-scFv-Fc,” “1+1+1 Fab-(Fab-scFv)-Fc,” “1+1+1 mAb-scFv,” and, “1+1+1 stackFab₂-Fab-Fc” format antibody (see FIGS. 82 and 83).

### F. Useful Antibody Formats

[1012] As will be appreciated by those in the art and discussed more fully below, the heterodimeric antibodies provided herein can take on several different configurations as generally depicted in FIGS. 82 and 83.

[1013] As will be appreciated by those in the art, the heterodimeric formats of the invention can have different valencies as well as be bispecific. That is, heterodimeric antibodies of the invention can be bivalent and bispecific, or trivalent and bispecific, wherein the first antigen is bound by two binding domains and the second antigen by a second binding domain.

[1014] In some embodiments, the present invention utilizes PD-L1 antigen binding domains. Any of the anti-PD-L1 antigen binding domains can be used, whether CDRs, variable light and variable heavy domains, Fabs and scFvs as depicted herein, including in any of the Figures (e.g., FIGS. 17, 19, 20, 21, 24-26, and 28 or a variant thereof) and the Sequence Listing, can be used, optionally and independently combined in any combination. In some embodiments, the antibody includes a PD-L1 binding domain having a variable heavy domain and variable light domain selected from the following:
[1015] i) a variable heavy domain of any of the PD-L1 variable heavy domains in FIGS. 17 and 19, and a variable light domain of any of the PD-L1 variable light domains in FIGS. 17 and 20,
[1016] ii) a variable heavy domain and variable light domain of any of the PD-L1 binding domains in FIGS. 17 and 21,
[1017] iii) a variable heavy domain of any of the PD-L1 binding domains in FIGS. 25 and 26, and a variable light domain of any of the PD-L1 binding domains in FIGS. 25 and 26,
[1018] iv) a variable heavy domain and variable light domain of any of the PD-L1 binding domains in FIGS. 25 and 26,
[1019] v) a variable heavy domain of any of the PD-L1 binding domains in FIGS. 25 and 26, and a variable light domain having the amino acid sequence of SEQ ID NO:20 (FIG. 24), and
[1020] vi) a variable heavy domain and variable light domain of any of the PD-L1 binding domains in FIG. 28.

[1021] In some embodiments, the present invention utilizes PD-L2 antigen binding domains. Any of the anti-PD-L2 antigen binding domains can be used, whether CDRs, variable light and variable heavy domains, Fabs and scFvs as depicted herein, including in any of the Figures (e.g., FIGS. 24, 29-32 and 34 or a variant thereof) and the Sequence Listing, can be used, optionally and independently combined in any combination. In some embodiments, the antibody includes a PD-L2 binding domain having a variable heavy domain and variable light domain selected from the following:
[1022] i) a variable heavy domain of any of the PD-L2 binding domains in FIGS. 29-32, and a variable light domain of any of the PD-L2 binding domains in FIGS. 29-32,
[1023] ii) a variable heavy domain and variable light domain of any of the PD-L2 binding domains in FIGS. 29-32,
[1024] iii) a variable heavy domain of any of the PD-L2 binding domains in FIGS. 29-32, and a variable light domain having the amino acid sequence of SEQ ID NO:20 (FIG. 24), and
[1025] iv) a variable heavy domain and variable light domain of any of the PD-L2 binding domains in FIG. 34.

[1026] In some embodiments, the present invention utilizes CD28 antigen binding domains in combination with PD-L1 and/or PD-L2 binding domains. As is outlined herein, when CD28 is one of the target antigens, it is preferable that the CD28 is bound only monovalently. As will be appreciated by those in the art, any collection of anti-CD28 CDRs, anti-CD28 variable light and variable heavy domains, Fabs and scFvs as depicted herein, including in any of the Figures (see particularly FIGS. 35, 37, 38, 41-74 and 81) and the Sequence Listing, can be used. In some embodiments, the antibody includes a CD28 binding domain having a variable heavy domain and variable light domain selected from the following:
[1027] i) a variable heavy domain of any of the CD28 binding domains in FIGS. 35, 36, and 38, and a variable light domain of any of the CD28 binding domains in FIGS. 35, 37, and 38,
[1028] ii) a variable heavy domain and a variable light domain of any of the CD28 binding domains in FIG. 38,
[1029] iii) a variable heavy domain of any of the CD28 binding domains in FIGS. 41-74, and a variable light domain of any of the CD28 binding domains in FIGS. 41-74,
[1030] iv) a variable heavy domain and variable light domain of any of the CD28 binding domains in FIGS. 41-74,
[1031] v) a variable heavy domain of any of the CD28 binding domains in FIGS. 41-74, and a variable light domain having the amino acid sequence of SEQ ID NO:20 (FIG. 24), and
[1032] vi) a variable heavy domain and variable light domain of any of the CD28 binding domains in FIG. 81.

[1033] 1. 1+1 Fab-scFv-Fc Format (“Bottle Opener”)

[1034] One heterodimeric antibody format that finds particular use in subject bispecific antibodies provided herein (e.g., anti-PD-L1×anti-CD28 and anti-PD-L1×anti-CD28 antibodies) is the “1+1 Fab-scFv-Fc” or “bottle opener” format as shown in FIG. 82A. The 1+1 Fab-scFv-Fc format antibody includes a first monomer that is a “regular” heavy chain (VH1-CH1-hinge-CH2-CH3), wherein VH1 is a first variable heavy domain and CH2-CH3 is a first Fc domain. The 1+1 Fab-scFv-Fc also includes a light chain that includes a first variable light domain VL1 and a constant light domain CL. The light chain interacts with the VH1-CH1 of the first monomer to form a first antigen binding domain that is a Fab. The second monomer of the antibody includes a second binding domain that is a single chain Fv (“scFv”, as defined below) and a second Fc domain. The scFv includes a second variable heavy domain (VH2) and a second variable light domain (VL2), wherein the VH2 is attached to the VL2 using an scFv linker that can be charged (see, e.g., FIG. 7). The scFv is attached to the heavy chain using a domain linker (see, e.g., FIG. 8). The two monomers are brought together by the use of amino acid variants (e.g., heterodimerization variants, discussed above) in the constant regions (e.g., the Fc domain, the CH1 domain and/or the hinge region) that promote the formation of heterodimeric antibodies as is described more fully below. This structure is sometimes referred to herein as the “bottle-opener”format, due to a rough visual similarity to a bottle-opener. In some embodiments, the 1+1 Fab-scFv-Fc format antibody is a bivalent antibody.

[1035] There are several distinct advantages to the present “1+1 Fab-scFv-Fc” format. As is known in the art, antibody analogs relying on two scFv constructs often have stability and aggregation problems, which can be alleviated in the present invention by the addition of a “regular” heavy and light chain pairing. In addition, as opposed to formats that rely on two heavy chains and two light chains, there is no issue with the incorrect pairing of heavy and light chains (e.g., heavy 1 pairing with light 2, etc.).

[1036] In some embodiments of the 1+1 Fab-scFv-Fc format antibody, one of the first or second antigen binding domain is a PD-L1 binding domain. In some embodiments, the first binding domain (i.e., the Fab) is a PD-L1 binding domain. In certain embodiments, the second binding domain (i.e., the scFv) is the PD-L1 binding domain. Any suitable PD-L1 binding domain can be included in the subject antibody including those provided herein or a variant thereof (see, e.g., FIGS. 17, 19, 20, 21, 24-26, and 28 and the Sequence Listing). In some embodiments, the PD-L1 binding domain includes a variable heavy domain and variable light domain selected from the following:
[1037] i) a variable heavy domain of any of the PD-L1 variable heavy domains in FIGS. 17 and 19, and a variable light domain of any of the PD-L1 variable light domains in FIGS. 17 and 20,
[1038] ii) a variable heavy domain and variable light domain of any of the PD-L1 binding domains in FIGS. 17 and 21,
[1039] iii) a variable heavy domain of any of the PD-L1 binding domains in FIGS. 25 and 26, and a variable light domain of any of the PD-L1 binding domains in FIGS. 25 and 26,
[1040] iv) a variable heavy domain and variable light domain of any of the PD-L1 binding domains in FIGS. 25 and 26.
[1041] v) a variable heavy domain of any of the PD-L1 binding domains in FIGS. 25 and 26, and a variable light domain having the amino acid sequence of SEQ ID NO:20 (FIG. 24), and
[1042] vi) a variable heavy domain and variable light domain of any of the PD-L1 binding domains in FIG. 28.

[1043] In some embodiments of the 1+1 Fab-scFv-Fc format antibody, one of the first or second antigen binding domain is a PD-L2 binding domain. In some embodiments, the first binding domain (i.e., the Fab) is a PD-L2 binding domain. In certain embodiments, the second binding domain (i.e., the scFv) is the PD-L2 binding domain. Any suitable PD-L2 binding domain can be included in the subject antibody including those provided herein or a variant thereof (see, e.g., FIGS. 24, 29-32 and 34 and the Sequence Listing). In some embodiments, the PD-L2 binding domain includes a variable heavy domain and variable light domain selected from the following:
[1044] i) a variable heavy domain of any of the PD-L2 binding domains in FIGS. 29-32, and a variable light domain of any of the PD-L2 binding domains in FIGS. 29-32,
[1045] ii) a variable heavy domain and variable light domain of any of the PD-L2 binding domains in FIGS. 29-32,
[1046] iii) a variable heavy domain of any of the PD-L2 binding domains in FIGS. 29-32, and a variable light domain having the amino acid sequence of SEQ ID NO:20 (FIG. 24), and
[1047] iv) a variable heavy domain and variable light domain of any of the PD-L2 binding domains in FIG. 34.

[1048] In some embodiments of the 1+1 Fab-scFv-Fc format antibody, one of the first or second antigen binding domain is a CD28 binding domain and the other binding domain is a PD-L1 or PD-L2 binding domain. In some embodiments where the 1+1 Fab-scFv-Fc includes a CD28 binding domain and a PD-L1 or PD-L2 binding domain, it is the scFv that binds to the CD28, and the Fab that binds PD-L1 or PD-L2. Exemplary anti-PD-L1×anti-CD28 bispecific antibody in the 1+1 Fab-scFv-Fc format is depicted in FIG. 84. In some embodiments, the anti-PD-L1×anti-CD28 bispecific antibody is an antibody depicted in FIG. 84. Exemplary anti-PD-L2×anti-CD28 bispecific antibody in the 1+1 Fab-scFv-Fc format is depicted in FIG. 87. In some embodiments, the anti-PD-L2×anti-CD28 bispecific antibody is an antibody depicted in FIG. 87.

[1049] In some embodiments, the first and second Fc domains of the 1+1 Fab-scFv-Fc format antibody are variant Fc domains that include heterodimerization skew variants (e.g., a set of amino acid substitutions as shown in FIGS. 4 and 9). Particularly useful heterodimerization skew variants include S364K/E357Q:L368D/K370S; L368D/K370S:S364K; L368E/K370S:S364K; T411T/E360E/Q362E:D401K; L368D/K370S:S364K/E357L; K370S:S364K/E357Q; T366S/L368A/Y407V:T366W and T366S/L368A/Y407V/Y349C:T366W/S354C (EU numbering)). In exemplary embodiments, one of the first or second variant Fc domains includes heterodimerization skew variants L368D/K370S and the other of the first or second variant Fc domains includes heterodimerization skew variants S364K/E357Q, wherein numbering is according to EU numbering. In exemplary embodiments, the first variant Fc domain includes heterodimerization skew variants L368D/K370S and the second variant Fc domain includes heterodimerization skew variants S364K/E357Q, wherein numbering is according to EU numbering.

[1050] In some embodiments, the variant Fc domains include ablation variants (including those shown in FIG. 6). In some embodiments, each of the first and second variant Fc domains include ablation variants E233P/L234V/L235A/G236_/S267K, wherein numbering is according to EU numbering.

[1051] In some embodiments, the constant domain (CH1-hinge-CH2-CH3) of the first monomer includes pI variants (including those shown in FIG. 5). In exemplary embodiments, the constant domain (CH1-hinge-CH2-CH3) of the first monomer includes pI variants N208D/Q295E/N384D/Q418E/N421D, wherein numbering is according to EU numbering.

[1052] In exemplary embodiments, the CH1-hinge-CH2-CH3 of the first monomer comprises amino acid variants L368D/K370S/N208D/Q295E/N384D/Q418E/N421D/E233P/L234V/L235A/G236del/S267K, the second Fc domain comprises amino acid variants S364K/E357Q/E233P/L234V/L235A/G236del/S267K, wherein numbering is according to EU numbering.

[1053] In some embodiments, the scFv of the 1+1 Fab-scFv-Fc format antibody provided herein includes a charged scFv linker (including those shown in FIG. 7). In some embodiments, the 1+1 Fab-scFv-Fc format antibody provided herein includes FcRn variants M428L/N434S, wherein numbering is according to EU numbering.

[1054] In exemplary embodiments, the first variant Fe domain includes heterodimerization skew variants L368D/K370S and the second variant Fc domain includes heterodimerization skew variants S364K/E357Q; each of the first and second variant Fc domains include ablation variants E233P/L234V/L235A/G236_/S267K; and the constant domain (CH1-hinge-CH2-CH3) of the first monomer includes pI variants N208D/Q295E/N384D/Q418E/N421D, wherein numbering is according to EU numbering. In some embodiments, the scFv of the 1+1 Fab-scFv-Fc format antibody provided herein includes a (GKPGS)₄ charged scFv linker. In some embodiments, the 1+1 Fab-scFv-Fc format antibody provided herein includes FcRn variants M428L/N434S, wherein numbering is according to EU numbering.

[1055] In some embodiments, one of the first binding domain or the second binding domain binds CD28 and the other binding domain binds PD-L1 or PD-L2. In some embodiments of the 1+1 Fab-scFv-Fc format antibody, the first antigen binding domain (i.e., the Fab binding domain) binds PD-L1 or PD-L2 and the second antigen binding domain (i.e., the scFv) binds CD28. In some embodiments of the 1+1 Fab-scFv-Fc format antibody, the first antigen binding domain binds CD28 (i.e., the Fab binding domain) and the second antigen binding domain (i.e., the scFv) binds PD-L1 or PD-L2.

[1056] Any suitable CD28 binding domain can be included in subject 1+1 Fab-scFv-Fc format antibody, including any of the CD28 binding domains provided herein (see FIGS. 35, 37, 38, 41-74 and 81). In some embodiments, the CD28 binding domain a VH and VL selected from those depicted in FIGS. 35, 37, 38, 41-74 and 81. In some embodiments, the CD28 binding domain includes a variable heavy domain and variable light domain selected from the following:
[1057] i) a variable heavy domain of any of the CD28 binding domains in FIGS. 35, 36, and 38, and a variable light domain of any of the CD28 binding domains in FIGS. 35, 37, and 38,
[1058] ii) a variable heavy domain and a variable light domain of any of the CD28 binding domains in FIG. 38,
[1059] iii) a variable heavy domain of any of the CD28 binding domains in FIGS. 41-74, and a variable light domain of any of the CD28 binding domains in FIGS. 41-74,
[1060] iv) a variable heavy domain and variable light domain of any of the CD28 binding domains in FIGS. 41-74,
[1061] v) a variable heavy domain of any of the CD28 binding domains in FIGS. 41-74, and a variable light domain having the amino acid sequence of SEQ ID NO:20 (FIG. 24), and

[1062] vi) a variable heavy domain and variable light domain of any of the CD28 binding domains in FIG. 81.

[1063] FIG. 10 shows some exemplary Fc domain sequences that are useful in the 1+1 Fab-scFv-Fc format antibodies. The “monomer 1” sequences depicted in FIG. 10 typically refer to the Fc domain of the “Fab-Fc heavy chain” and the “monomer 2” sequences refer to the Fc domain of the “scFv-Fc heavy chain.” In addition, FIGS. 12 and 13 provides exemplary CH1-hinge domains, CH1 domains, and hinge domains that can be included in the first or second monomer of the 1+1 Fab-scFv-Fc format. Further, FIG. 14 provides useful CL sequences that can be used with this format.

[1064] 2. 2+1 Fab₂-scFv-Fc Format (Central-scFv Format)

[1065] One heterodimeric antibody format that finds particular use in the subject antibodies provided herein (e.g., anti-PD-L1×anti-CD28 and anti-PD-L1×anti-CD28 antibodies) is the 2+1 Fab₂-scFv-Fc format (also referred to as “central-scFv format”) shown in FIG. 82B. This antibody format includes three antigen binding domains: two Fab portions and an scFv that is inserted between the VH-CH1 and CH2-CH3 regions of one of the monomers. In some embodiments of this format, the two Fab portions each bind PD-L1.

[1066] In some embodiments, the “extra” scFv domain binds CD28. In some embodiments, the 2+1 Fab₂-scFv-Fc format antibody is a trivalent antibody.

[1067] In some embodiments of the 2+1 Fab₂-scFv-Fc format, a first monomer includes a standard heavy chain (i.e., VH1-CH1-hinge-CH2-CH3), wherein VH1 is a first variable heavy domain and CH2-CH3 is a first Fc domain. A second monomer includes another first variable heavy domain (VH1), a CH1 domain (and optional hinge), a second Fc domain, and an scFv that includes an scFv variable light domain (VL2), an scFv linker and a scFv variable heavy domain (VH2). The scFv is covalently attached between the C-terminus of the CH1 domain of the second monomer and the N-terminus of the second Fc domain using optional domain linkers (VH1-CH1-[optional linker]-VH2-scFv linker-VH2-[optional linker]-CH2-CH3, or the opposite orientation for the scFv, VH1-CH1-[optional linker]-VL2-scFv linker-VH2-[optional linker]-CH2-CH3). The optional linkers can be any suitable peptide linkers, including, for example, the domain linkers included in FIG. 8. This embodiment further utilizes a common light chain that includes a variable light domain (VL1) and a constant light domain (CL). The common light chain associates with the VH1-CH1 of the first and second monomers to form two identical Fabs. In some embodiments, the identical Fabs each bind PD-L1. As for many of the embodiments herein, these constructs can include skew variants, pI variants, ablation variants, additional Fc variants, etc. as desired and described herein.

[1068] In some embodiments, the first and second Fc domains of the 2+1 Fab₂-scFv-Fc format antibody are variant Fc domains that include heterodimerization skew variants (e.g., a set of amino acid substitutions as shown in FIGS. 4 and 9). Particularly useful heterodimerization skew variants include S364K/E357Q:L368D/K370S; L368D/K370S:S364K; L368E/K370S:S364K; T411T/E360E/Q362E:D401K; L368D/K370S:S364K/E357L; K370S:S364K/E357Q; T366S/L368A/Y407V:T366W and T366S/L368A/Y407V/Y349C:T366W/S354C (EU numbering)). In exemplary embodiments, one of the first or second variant Fc domains includes heterodimerization skew variants L368D/K370S and the other of the first or second variant Fc domains includes heterodimerization skew variants S364K/E357Q, wherein numbering is according to EU numbering. In exemplary embodiments, the first variant Fc domain includes heterodimerization skew variants L368D/K370S and the second variant Fc domain includes heterodimerization skew variants S364K/E357Q, wherein numbering is according to EU numbering.

[1069] In some embodiments, the variant Fc domains include ablation variants (including those shown in FIG. 5). In some embodiments, each of the first and second variant Fc domains include ablation variants E233P/L234V/L235A/G236_/S267K, wherein numbering is according to EU numbering.

[1070] In some embodiments, the constant domain (CH1-hinge-CH2-CH3) of the first monomer includes pI variants (including those shown in FIG. 4). In exemplary embodiments, the constant domain (CH1-hinge-CH2-CH3) of the first monomer includes pI variants N208D/Q295E/N384D/Q418E/N421D, wherein numbering is according to EU numbering.

[1071] In some embodiments, the scFv of the 2+1 Fab₂-scFv-Fc format antibody provided herein includes a charged scFv linker (including those shown in FIG. 7). In some embodiments, the 2+1 Fab₂-scFv-Fc format antibody provided herein includes FcRn variants M428L/N434S, wherein numbering is according to EU numbering.

[1072] In exemplary embodiments, the first variant Fc domain includes heterodimerization skew variants L368D/K370S and the second variant Fc domain includes heterodimerization skew variants S364K/E357Q; each of the first and second variant Fc domains include ablation variants E233P/L234V/L235A/G236_/S267K; and the constant domain (CH1-hinge-CH2-CH3) of the first monomer includes pI variants N208D/Q295E/N384D/Q418E/N421D, wherein numbering is according to EU numbering. In some embodiments, the scFv of the 2+1 Fab₂-scFv-Fc format antibody provided herein includes a (GKPGS)₄ charged scFv linker. In some embodiments, the 2+1 Fab₂-scFv-Fc format antibody provided herein includes FcRn variants M428L/N434S, wherein numbering is according to EU numbering.

[1073] In some embodiments of the 2+1 Fab₂-scFv-Fc format antibody, the two Fab domains are PD-L1 or PD-L2 binding domains. In some embodiments, the scFv is the PD-L1 or PD-L2 binding domain.

[1074] Any suitable PD-L1 binding domain can be included in the subject 2+1 Fab₂-scFv-Fc format antibody including those provided herein (FIGS. 17, 19, 20, 21, 24-26, and 28 and the Sequence Listing) or a variant thereof. In some embodiments, the PD-L1 binding domain includes a variable heavy domain and variable light domain selected from the following:
[1075] i) a variable heavy domain of any of the PD-L1 variable heavy domains in FIGS. 17 and 19, and a variable light domain of any of the PD-L1 variable light domains in FIGS. 17 and 20,
[1076] ii) a variable heavy domain and variable light domain of any of the PD-L1 binding domains in FIGS. 17 and 21,
[1077] iii) a variable heavy domain of any of the PD-L1 binding domains in FIGS. 25 and 26, and a variable light domain of any of the PD-L1 binding domains in FIGS. 25 and 26,
[1078] iv) a variable heavy domain and variable light domain of any of the PD-L1 binding domains in FIGS. 25 and 26,
[1079] v) a variable heavy domain of any of the PD-L1 binding domains in FIGS. 25 and 26, and a variable light domain having the amino acid sequence of SEQ ID NO:20 (FIG. 24), and
[1080] vi) a variable heavy domain and variable light domain of any of the PD-L1 binding domains in FIG. 28.

[1081] Any suitable PD-L2 binding domain can be included in the subject 2+1 Fab2-scFv-Fc format antibody including those provided herein (FIGS. 29-32 and 34 and the Sequence Listing) or a variant thereof. In some embodiments, the PD-L2 binding domain includes a variable heavy domain and variable light domain selected from the following:
[1082] i) a variable heavy domain of any of the PD-L2 binding domains in FIGS. 29-32, and a variable light domain of any of the PD-L2 binding domains in FIGS. 29-32,
[1083] ii) a variable heavy domain and variable light domain of any of the PD-L2 binding domains in FIGS. 29-32,
[1084] iii) a variable heavy domain of any of the PD-L2 binding domains in FIGS. 29-32, and a variable light domain having the amino acid sequence of SEQ ID NO:20 (FIG. 24), and
[1085] iv) a variable heavy domain and variable light domain of any of the PD-L2 binding domains in FIG. 34.

[1086] Any suitable CD28 binding domain can be included in subject 2+1 Fab2-scFv-Fc format antibody, including any of the CD28 binding domains provided herein (see, e.g., FIGS. 35, 37, 38, 41-74 and 81 and the Sequence Listing) or a variant thereof. In some embodiments, the CD28 binding domain includes a variable heavy domain and variable light domain selected from the following:
[1087] i) a variable heavy domain of any of the CD28 binding domains in FIGS. 35, 36, and 38, and a variable light domain of any of the CD28 binding domains in FIGS. 35, 37, and 38,
[1088] ii) a variable heavy domain and a variable light domain of any of the CD28 binding domains in FIG. 38,
[1089] iii) a variable heavy domain of any of the CD28 binding domains in FIGS. 41-74, and a variable light domain of any of the CD28 binding domains in FIGS. 41-74,
[1090] iv) a variable heavy domain and variable light domain of any of the CD28 binding domains in FIGS. 41-74,
[1091] v) a variable heavy domain of any of the CD28 binding domains in FIGS. 41-74, and a variable light domain having the amino acid sequence of SEQ ID NO:20 (FIG. 24), and
[1092] vi) a variable heavy domain and variable light domain of any of the CD28 binding domains in FIG. 81.

[1093] FIG. 11 shows some exemplary Fc domain sequences that are useful with the 2+1 Fab2-scFv-Fc format. The “monomer 1” sequences depicted in FIG. 11 typically refer to the Fc domain of the “Fab-Fc heavy chain” and the “monomer 2” sequences refer to the Fc domain of the “Fab-scFv-Fc heavy chain.” In addition, FIGS. 12 and 13 provides exemplary CH1-hinge domains, CH1 domains, and hinge domains that can be included in the first or second monomer of the 2+1 Fab2-scFv-Fc format. Further, FIG. 14 provides useful CL sequences that can be used with this format.

[1094] Exemplary anti-PD-L1×anti-CD28×antibodies in the 2+1 Fab₂-scFv-Fc format are depicted in FIG. 85. In some embodiments, the anti-PD-L1×anti-CD28×antibody is an antibody depicted in FIG. 85.

[1095] 3. 1+1 CLC Format

[1096] One heterodimeric antibody format that finds particular use in subject bispecific antibodies provided herein (e.g., anti-PD-L1×anti-CD28 and anti-PD-L1×anti-CD28 antibodies) is the “1+1 Common Light Chain” or “1+1 CLC” format, which is depicted in FIG. 82C. The 1+1 CLC format antibody includes a first monomer that includes a VH1-CH1-hinge-CH2-CH3, wherein VH1 is a first variable heavy domain and CH2-CH3 is a first Fc domain; a second monomer that includes a VH2-CH1-hinge-CH2-CH3, wherein VH2 is a second variable heavy domain and CH2-C3 is a second Fc domain; and a third monomer “common light chain” comprising VL-CL, wherein VL is a common variable light domain and CL is a constant light domain. In such embodiments, the VL pairs with the VH1 to form a first binding domain with a first antigen binding specificity; and the VL pairs with the VH2 to form a second binding domain with a second antigen binding specificity. In some embodiments, the 1+1 CLC format antibody is a bivalent antibody.

[1097] In some embodiments, the first and second Fc domains of the 1+1 CLC format are variant Fc domains that include heterodimerization skew variants (e.g., a set of amino acid substitutions as shown in FIGS. 4 and 9). Particularly useful heterodimerization skew variants include S364K/E357Q:L368D/K370S; L368D/K370S:S364K; L368E/K370S:S364K; T411T/E360E/Q362E:D401K; L368D/K370S:S364K/E357L; K370S:S364K/E357Q; T366S/L368A/Y407V:T366W and T366S/L368A/Y407V/Y349C:T366W/S354C (EU numbering). In exemplary embodiments, one of the first or second variant Fc domains includes heterodimerization skew variants L368D/K370S and the other of the first or second variant Fc domains includes heterodimerization skew variants S364K/E357Q, wherein numbering is according to EU numbering. In exemplary embodiments, the first variant Fc domain includes heterodimerization skew variants L368D/K370S and the second variant Fc domain includes heterodimerization skew variants S364K/E357Q, wherein numbering is according to EU numbering.

[1098] In some embodiments, the variant Fc domains include ablation variants (including those shown in FIG. 6). In some embodiments, each of the first and second variant Fc domains include ablation variants E233P/L234V/L235A/G236_/S267K, wherein numbering is according to EU numbering.

[1099] In some embodiments, the constant domain (CH1-hinge-CH2-CH3) of the first or second monomer includes pI variants (including those shown in FIG. 5). In exemplary embodiments, the constant domain (CH1-hinge-CH2-CH3) of the first or second monomer includes pI variants N208D/Q295E/N384D/Q418E/N421D, wherein numbering is according to EU numbering.

[1100] In some embodiments, the 1+1 CLC format antibody provided herein includes FcRn variants M428L/N434S, wherein numbering is according to EU numbering.

[1101] In exemplary embodiments, the first variant Fc domain includes heterodimerization skew variants L368D/K370S and the second variant Fc domain includes heterodimerization skew variants S364K/E357Q; each of the first and second variant Fc domains include ablation variants E233P/L234V/L235A/G236_/S267K; and the constant domain (CH1-hinge-CH2-CH3) of the first monomer includes pI variants N208D/Q295E/N384D/Q418E/N421D, wherein numbering is according to EU numbering. In some embodiments, the 1+1 CLC format antibody provided herein further includes FcRn variants M428L/N434S, wherein numbering is according to EU numbering.

[1102] In some embodiments of the 1+1 CLC format antibody, one of the first or second antigen binding domain is a PD-L1 binding domain. Any suitable PD-L1 binding domain can be included in the subject 1+1 CLC format antibody format antibody including those provided herein (FIGS. 17, 19, 20, 21, 24-26, and 28 and the Sequence Listing) or a variant thereof. In some embodiments, the PD-L1 binding domain includes a variable heavy domain and variable light domain selected from the following:
[1103] i) a variable heavy domain of any of the PD-L1 binding domains in FIGS. 25 and 26, and a variable light domain of any of the PD-L1 binding domains in FIGS. 25 and 26,
[1104] ii) a variable heavy domain and variable light domain of any of the PD-L1 binding domains in FIGS. 25 and 26, and
[1105] iii) a variable heavy domain of any of the PD-L1 binding domains in FIGS. 25 and 26, and a variable light domain having the amino acid sequence of SEQ ID NO:20 (FIG. 24).

[1106] In some embodiments of the 1+1 CLC format antibody, one of the first or second antigen binding domain is a PD-L2 binding domain. Any suitable PD-L2 binding domain can be included in the subject 1+1 CLC format antibody format antibody including those provided herein (FIGS. 29-32 and the Sequence Listing) or a variant thereof. In some embodiments, the PD-L2 binding domain includes a variable heavy domain and variable light domain selected from the following:
[1107] i) a variable heavy domain of any of the PD-L2 binding domains in FIGS. 29-32, and a variable light domain of any of the PD-L2 binding domains in FIGS. 29-32,
[1108] ii) a variable heavy domain and variable light domain of any of the PD-L2 binding domains in FIGS. 29-32, and
[1109] iii) a variable heavy domain of any of the PD-L2 binding domains in FIGS. 29-32, and a variable light domain having the amino acid sequence of SEQ ID NO:20 (FIG. 24).

[1110] In some embodiments of the 1+1 CLC format antibody, one of the first or second antigen binding domain is a CD28 binding domain. Any suitable CD28 binding domain can be included in the subject 1+1 CLC format antibody format antibody including those provided herein (FIGS. 241-47 and the Sequence Listing) or a variant thereof. In some embodiments, the CD28 binding domain includes a variable heavy domain and variable light domain selected from the following:
[1111] i) a variable heavy domain of any of the CD28 binding domains in FIGS. 41-74, and a variable light domain of any of the CD28 binding domains in FIGS. 41-74,
[1112] ii) a variable heavy domain and variable light domain of any of the CD28 binding domains in FIGS. 41-74, and
[1113] iii) a variable heavy domain of any of the CD28 binding domains in FIGS. 41-74, and a variable light domain having the amino acid sequence of SEQ ID NO:20 (FIG. 24).

[1114] 4. 2+1 CLC Format

[1115] Another heterodimeric antibody format that finds particular use in subject bispecific antibodies provided herein (e.g., anti-PD-L1×anti-CD28 and anti-PD-L1×anti-CD28 antibodies) is the “2+1 Common Light Chain” or “2+1 CLC” format, which is depicted in FIG. 82D. The 2+1 CLC format includes a first monomer that includes a VH1-CH1-linker-VH1-CH1-hinge-CH2-CH3, wherein the VH1s are each a first variable heavy domain and CH2-CH3 is a first Fc domain; a second monomer that includes a VH2-CH1-hinge-CH2-CH3, wherein VH2 is a second variable heavy domain and CH2-CH3 is a second Fc domain; and a third monomer that includes a “common light chain” VL-CL, wherein VL is a common variable light domain and CL is a constant light domain. The VL pairs with each of the VH1s of the first monomer to form two first binding domains, each with a first antigen binding specificity; and the VL pairs with the VH2 to form a second binding domain with a second antigen binding specificity. The linker of the first monomer can be any suitable linker, including any one of the domain linkers or combinations thereof described in FIG. 8. In some embodiments, the linker is EPKSCGKPGSGKPGS (SEQ ID NO:936). In some embodiments, the 2+1 CLC format antibody is a trivalent antibody.

[1116] In some embodiments, the first and second Fc domains of the 2+1 CLC format are variant Fc domains that include heterodimerization skew variants (e.g., a set of amino acid substitutions as shown in FIGS. 4 and 9). Particularly useful heterodimerization skew variants include S364K/E357Q:L368D/K370S; L368D/K370S:S364K; L368E/K370S:S364K; T411T/E360E/Q362E:D401K; L368D/K370S:S364K/E357L; K370S:S364K/E357Q; T366S/L368A/Y407V:T366W and T366S/L368A/Y407V/Y349C:T366W/S354C (EU numbering)). In exemplary embodiments, one of the first or second variant Fc domains includes heterodimerization skew variants L368D/K370S and the other of the first or second variant Fc domains includes heterodimerization skew variants S364K/E357Q, wherein numbering is according to EU numbering. In exemplary embodiments, the first variant Fc domain includes heterodimerization skew variants L368D/K370S and the second variant Fc domain includes heterodimerization skew variants S364K/E357Q, wherein numbering is according to EU numbering.

[1117] In some embodiments, the variant Fc domains include ablation variants (including those shown in FIG. 6). In some embodiments, each of the first and second variant Fc domains include ablation variants E233P/L234V/L235A/G236_/S267K, wherein numbering is according to EU numbering.

[1118] In some embodiments, the constant domain (CH1-hinge-CH2-CH3) of the first or second monomer includes pI variants (including those shown in FIG. 5). In exemplary embodiments, the constant domain (CH1-hinge-CH2-CH3) of the first or second monomer includes pI variants N208D/Q295E/N384D/Q418E/N421D, wherein numbering is according to EU numbering.

[1119] In some embodiments, the 2+1 CLC format antibody provided herein further includes FcRn variants M428L/N434S, wherein numbering is according to EU numbering.

[1120] In exemplary embodiments, the first variant Fe domain includes heterodimerization skew variants L368D/K370S and the second variant Fc domain includes heterodimerization skew variants S364K/E357Q; each of the first and second variant Fc domains include ablation variants E233P/L234V/L235A/G236_/S267K; and the constant domain (CH1-hinge-CH2-CH3) of the first monomer includes pI variants N208D/Q295E/N384D/Q418E/N421D, wherein numbering is according to EU numbering. In some embodiments, the 2+1 CLC format antibody provided herein further includes FcRn variants M428L/N434S, wherein numbering is according to EU numbering.

[1121] In some embodiments of the 2+1 CLC format antibody, each of the two first binding domains is a PD-L1 binding domain. In some embodiments, the second binding domain is a PD-L1 binding domain. Any suitable PD-L1 binding domain can be included in the subject 2+1 CLC format antibody format antibody including those provided herein (FIGS. 17, 19, 20, 21, 24-26, and 28 and the Sequence Listing) or a variant thereof. In some embodiments, the PD-L1 binding domain includes a variable heavy domain and variable light domain selected from the following:
[1122] i) a variable heavy domain of any of the PD-L1 binding domains in FIGS. 25 and 26, and a variable light domain of any of the PD-L1 binding domains in FIGS. 25 and 26 or a variant thereof,
[1123] ii) a variable heavy domain and variable light domain of any of the PD-L1 binding domains in FIGS. 25 and 26 or a variant thereof, and
[1124] iii) a variable heavy domain of any of the PD-L1 binding domains in FIGS. 25 and 26, and a variable light domain having the amino acid sequence of SEQ ID NO:20 (FIG. 24) or a variant thereof.

[1125] In some embodiments of the 2+1 CLC format antibody, each of the two first binding domains is a PD-L2 binding domain. In some embodiments, the second binding domain is a PD-L1 binding domain. Any suitable PD-L2 binding domain can be included in the subject 1+1 CLC format antibody format antibody including those provided herein (FIGS. 29-32 and the Sequence Listing) or a variant thereof. In some embodiments, the PD-L2 binding domain includes a variable heavy domain and variable light domain selected from the following:
[1126] i) a variable heavy domain of any of the PD-L2 binding domains in FIGS. 29-32, and a variable light domain of any of the PD-L2 binding domains in FIGS. 29-32 or a variant thereof,
[1127] ii) a variable heavy domain and variable light domain of any of the PD-L2 binding domains in FIGS. 29-32 or a variant thereof, and
[1128] iii) a variable heavy domain of any of the PD-L2 binding domains in FIGS. 29-32, and a variable light domain having the amino acid sequence of SEQ ID NO:20 (FIG. 24) or a variant thereof.

[1129] In some embodiments of the 2+1 CLC format antibody, one of the antigen binding domain is a CD28 binding domain. Any suitable CD28 binding domain can be included in the subject 2+1 CLC format antibody format antibody including those provided herein (FIGS. 241-47 and the Sequence Listing) or a variant thereof. In some embodiments, the CD28 binding domain includes a variable heavy domain and variable light domain selected from the following:
[1130] i) a variable heavy domain of any of the CD28 binding domains in FIGS. 41-74, and a variable light domain of any of the CD28 binding domains in FIGS. 41-74 or a variant thereof,
[1131] ii) a variable heavy domain and variable light domain of any of the CD28 binding domains in FIGS. 41-74 or a variant thereof, and
[1132] iii) a variable heavy domain of any of the CD28 binding domains in FIGS. 41-74, and a variable light domain having the amino acid sequence of SEQ ID NO:20 (FIG. 24) or a variant thereof.

[1133] 5. 2+1 mAb-scFv Format

[1134] One heterodimeric antibody format that finds particular use in the subject bispecific antibodies provided herein (e.g., anti-PD-L1×anti-CD28 and anti-PD-L1×anti-CD28 antibodies) is the 2+1 mAb-scFv format shown in FIG. 82E. This antibody format includes three antigen binding domains: two Fab portions and an scFv that is attached to the C-terminal of one of the heavy chains. In some embodiments of this format, the Fab portions each bind PD-L1. In some embodiments, the “extra” scFv domain binds CD28. That is, this mAb-scFv format is a trivalent antibody.

[1135] In these embodiments, the first chain or monomer comprises, from N- to C-terminal, VH1-CH1-hinge-CH2-CH3, the second monomer comprises, from N- to C-terminal, VH1-CH1-hinge-CH2-CH3-domain linker-scFv domain, where the scFv domain comprises a second VH (VH2), a second VL (VL2) and a scFv linker. As for all the scFv domains herein, the scFv domain can be in either orientation, from N- to C-terminal, VH2-scFv linker-VL2 or VL2-scFv linker-VH2. Accordingly, the second monomer may comprise, from N- to C-terminal, VH1-CH1-hinge-CH2-CH3-domain linker-VH2-scFv linker-VL2 or VH1-CH1-hinge-CH2-CH3-domain linker-VL2-scFv linker-VH2. The composition also comprises a light chain, VL1-CL. In these embodiments, the VH1-VL1 each form a first ABD and the VH2-VL2 form a second ABD. In some embodiments, the first ABD binds to a tumor target antigen, including human B7H3, and the second ABD binds human CD28.

[1136] In some embodiments, the first and second Fc domains of the 2+1 mAb-scFv format antibody are variant Fc domains that include heterodimerization skew variants (e.g., a set of amino acid substitutions as shown in FIGS. 4 and 9). Particularly useful heterodimerization skew variants include S364K/E357Q:L368D/K370S; L368D/K370S:S364K; L368E/K370S:S364K; T411T/E360E/Q362E:D401K; L368D/K370S:S364K/E357L; K370S:S364K/E357Q; T366S/L368A/Y407V:T366W and T366S/L368A/Y407V/Y349C:T366W/S354C (EU numbering)). In exemplary embodiments, one of the first or second variant Fc domains includes heterodimerization skew variants L368D/K370S and the other of the first or second variant Fc domains includes heterodimerization skew variants S364K/E357Q, wherein numbering is according to EU numbering. In exemplary embodiments, the first variant Fc domain includes heterodimerization skew variants L368D/K370S and the second variant Fc domain includes heterodimerization skew variants S364K/E357Q, wherein numbering is according to EU numbering.

[1137] In some embodiments, the variant Fc domains include ablation variants (including those shown in FIG. 5). In some embodiments, each of the first and second variant Fc domains include ablation variants E233P/L234V/L235A/G236_/S267K, wherein numbering is according to EU numbering.

[1138] In some embodiments, the constant domain (CH1-hinge-CH2-CH3) of the first monomer includes pI variants (including those shown in FIG. 4). In exemplary embodiments, the constant domain (CH1-hinge-CH2-CH3) of the first monomer includes pI variants N208D/Q295E/N384D/Q418E/N421D, wherein numbering is according to EU numbering.

[1139] In some embodiments, the scFv of the 2+1 mAb-scFv format antibody provided herein includes a charged scFv linker (including those shown in FIG. 7). In some embodiments, the 2+1 mAb-scFv format antibody provided herein includes FcRn variants M428L/N434S, wherein numbering is according to EU numbering.

[1140] In exemplary embodiments, the first variant Fc domain includes heterodimerization skew variants L368D/K370S and the second variant Fc domain includes heterodimerization skew variants S364K/E357Q; each of the first and second variant Fc domains include ablation variants E233P/L234V/L235A/G236_/S267K; and the constant domain (CH1-hinge-CH2-CH3) of the first monomer includes pI variants N208D/Q295E/N384D/Q418E/N421D, wherein numbering is according to EU numbering. In some embodiments, the scFv of the 2+1 mAb-scFv format antibody provided herein includes a (GKPGS)₄ charged scFv linker. In some embodiments, 2+1 mAb-scFv format antibody provided herein includes FcRn variants M428L/N434S, wherein numbering is according to EU numbering.

[1141] Any suitable PD-L1 binding domain can be included in the subject 2+1 mAb-scFv format antibody including those provided herein (FIGS. 17, 19, 20, 21, 24-26, and 28 and the Sequence Listing) or a variant thereof. In some embodiments of the 2+1 mAb-scFv, the VH1 of the first and second monomer and the VL1 of the common light chain each form a PD-L1 binding domain. In some embodiments, the scFv of the second monomer is a PD-L1 binding domain.

[1142] In some embodiments, the PD-L1 binding domain includes a variable heavy domain and variable light domain selected from the following:
[1143] i) a variable heavy domain of any of the PD-L1 variable heavy domains in FIGS. 17 and 19, and a variable light domain of any of the PD-L1 variable light domains in FIGS. 17 and 20 or a variant thereof,
[1144] ii) a variable heavy domain and variable light domain of any of the PD-L1 binding domains in FIGS. 17 and 21 or a variant thereof,
[1145] iii) a variable heavy domain of any of the PD-L1 binding domains in FIGS. 25 and 26, and a variable light domain of any of the PD-L1 binding domains in FIGS. 25 and 26 or a variant thereof,
[1146] iv) a variable heavy domain and variable light domain of any of the PD-L1 binding domains in FIGS. 25 and 26 or a variant thereof,
[1147] v) a variable heavy domain of any of the PD-L1 binding domains in FIGS. 25 and 26, and a variable light domain having the amino acid sequence of SEQ ID NO:20 (FIG. 24) or a variant thereof, and
[1148] vi) a variable heavy domain and variable light domain of any of the PD-L1 binding domains in FIG. 28 or a variant thereof.

[1149] Any suitable PD-L2 binding domain can be included in the subject 2+1 mAb-scFv format antibody including those provided herein (FIGS. 29-34 and the Sequence Listing) or a variant thereof. In some embodiments of the 2+1 mAb-scFv, the VH1 of the first and second monomer and the VL1 of the common light chain each form a PD-L2 binding domain. In some embodiments, the scFv of the second monomer is a PD-L2 binding domain.

[1150] In some embodiments, the PD-L2 binding domain includes a variable heavy domain and variable light domain selected from the following:
[1151] i) a variable heavy domain of any of the PD-L2 binding domains in FIGS. 29-32, and a variable light domain of any of the PD-L2 binding domains in FIGS. 29-32 or a variant thereof,
[1152] ii) a variable heavy domain and variable light domain of any of the PD-L2 binding domains in FIGS. 29-32 or a variant thereof,
[1153] iii) a variable heavy domain of any of the PD-L2 binding domains in FIGS. 29-32, and a variable light domain having the amino acid sequence of SEQ ID NO:20 (FIG. 24) or a variant thereof, and
[1154] iv) a variable heavy domain and variable light domain of any of the PD-L2 binding domains in FIG. 34 or a variant thereof.

[1155] In some embodiments, the 2+1 mAb-scFv format antibody is a bispecific antibody that binds CD28 and PD-L1 or PD-L2. In some embodiments, the scFv of the second monomer is a CD28 binding domain and the VH1 of the first and second monomer and the VL1 of the common light chain each form PD-L1 or PD-L2 binding domains. In some embodiments, the scFv of the second monomer is a PD-L1 or PD-L1 binding domain and the VH1 of the first and second monomer and the VL1 of the common light chain each form CD28 binding domains.

[1156] Any suitable CD28 binding domain can be included in subject 2+1 mAb-scFv format antibody, including any of the CD28 binding domains provided herein (see, e.g., FIGS. 35, 37, 38, 41-74 and 81 and the Sequence Listing) or a variant thereof. In some embodiments, the CD28 binding domain includes a variable heavy domain and variable light domain selected from the following:
[1157] i) a variable heavy domain of any of the CD28 binding domains in FIGS. 35, 36, and 38, and a variable light domain of any of the CD28 binding domains in FIGS. 35, 37, and 38 or a variant thereof,
[1158] ii) a variable heavy domain and a variable light domain of any of the CD28 binding domains in FIG. 38 or a variant thereof,
[1159] iii) a variable heavy domain of any of the CD28 binding domains in FIGS. 41-74, and a variable light domain of any of the CD28 binding domains in FIGS. 41-74 or a variant thereof,
[1160] iv) a variable heavy domain and variable light domain of any of the CD28 binding domains in FIGS. 41-74 or a variant thereof,
[1161] v) a variable heavy domain of any of the CD28 binding domains in FIGS. 41-74, and a variable light domain having the amino acid sequence of SEQ ID NO:20 (FIG. 24) or a variant thereof, and
[1162] vi) a variable heavy domain and variable light domain of any of the CD28 binding domains in FIG. 81 or a variant thereof.

[1163] FIGS. 10 and 11 show some exemplary Fe domain sequences that are useful with the 2+1 mAb-scFv format. The “monomer 1” sequences depicted in FIG. 10 typically refer to the Fc domain of the “Fab-Fc heavy chain” and the “monomer 2” sequences refer to the Fc domain of the “Fab-Fc-scFv” heavy chain.” In addition, FIG. 12 provides exemplary CH1 (optionally including hinge or half-hinge domains) that can be used in either the “Fab-Fc heavy chain” monomer or the “Fab-Fc-scFv” heavy chain.” FIG. 13 provides exemplary hinge domains that may be used in either the “Fab-Fc heavy chain” monomer or the “Fab-Fc-scFv” heavy chain.” Further, FIG. 14 provides useful CL sequences that can be used with this format.

[1164] An exemplary anti-PD-L1×anti-CD28×antibody in the 2+1 mAb-scFv format is depicted in FIG. 37.

[1165] 6. Dual scFv Formats

[1166] One heterodimeric antibody format that finds particular use in the subject bispecific antibodies (e.g., anti-PD-L1×anti-CD28 and anti-PD-L1×anti-CD28 antibodies) is the dual scFv format, as are known in the art and shown in FIG. 82F. In this embodiment, the heterodimeric bispecific antibody is made up of two scFv-Fc monomers (both in either (vh-scFv linker-vl-[optional domain linker]-CH2-CH3) format or (vl-scFv linker-vh-[optional domain linker]-CH2-CH3) format, or with one monomer in one orientation and the other in the other orientation.

[1167] In this case, all ABDs are in the scFv format. Any suitable PD-L1 binding domain, PD-L2 binding domain and CD28 binding domain can be included in subject bispecific antibodies in the dual scFv format, including any of the PD-L1, PD-L2, and CD28 binding domains provided herein.

[1168] In addition, the Fc domains of the dual scFv format comprise skew variants (e.g. a set of amino acid substitutions as shown in FIGS. 4 and 9, with particularly useful skew variants being selected from the group consisting of S364K/E357Q:L368D/K370S; L368D/K370S:S364K; L368E/K370S:S364K; T411T/E360E/Q362E:D401K; L368D/K370S:S364K/E357L, K370S:S364K/E357Q, T366S/L368A/Y407V:T366W and T366S/L368A/Y407V/Y349C:T366W/S354C), optionally ablation variants (including those shown in FIG. 6), optionally charged scFv linkers (including those shown in FIG. 7) and the heavy chain comprises pI variants (including those shown in FIG. 5).

[1169] In some embodiments, the dual scFv format includes skew variants, pI variants, and ablation variants. Accordingly, some embodiments include formats that comprise: a) a first monomer that comprises the skew variants S364K/E357Q, the ablation variants E233P/L234V/L235A/G236del/S267K, and a scFv that binds a first antigen (VH1-scFv linker-VL1-[optional domain linker]-CH2-CH3 or VL1-scFv linker-VH1-[optional domain linker]-CH2-CH3) and b) a first monomer that comprises the skew variants L368D/K370S, the ablation variants E233P/L234V/L235A/G236del/S267K, and a scFv that binds a second antigen (VH1-scFv linker-VL1-[optional domain linker]-CH2-CH3 or VL1-scFv linker-VH1-[optional domain linker]-CH2-CH3). pI variants can be as outlined herein, but most common will be charged scFv linkers of opposite charge for each monomer. FcRn variants, particularly 428L/434S, can optionally be included.

[1170] Any suitable PD-L1 binding domain can be included in the subject dual scFv format antibody including those provided herein (FIGS. 17, 19, 20, 21, 24-26, and 28 and the Sequence Listing) or a variant thereof. In some embodiments, the PD-L1 binding domain includes a variable heavy domain and variable light domain selected from the following:
[1171] i) a variable heavy domain of any of the PD-L1 variable heavy domains in FIGS. 17 and 19, and a variable light domain of any of the PD-L1 variable light domains in FIGS. 17 and 20 or a variant thereof,
[1172] ii) a variable heavy domain and variable light domain of any of the PD-L1 binding domains in FIGS. 17 and 21 or a variant thereof,
[1173] iii) a variable heavy domain of any of the PD-L1 binding domains in FIGS. 25 and 26, and a variable light domain of any of the PD-L1 binding domains in FIGS. 25 and 26 or a variant thereof,
[1174] iv) a variable heavy domain and variable light domain of any of the PD-L1 binding domains in FIGS. 25 and 26 or a variant thereof,
[1175] v) a variable heavy domain of any of the PD-L1 binding domains in FIGS. 25 and 26, and a variable light domain having the amino acid sequence of SEQ ID NO:20 (FIG. 24) or a variant thereof, and
[1176] vi) a variable heavy domain and variable light domain of any of the PD-L1 binding domains in FIG. 28 or a variant thereof.

[1177] Any suitable PD-L2 binding domain can be included in the subject dual scFv format antibody including those provided herein (FIGS. 29-34 and the Sequence Listing) or a variant thereof. In some embodiments, the PD-L2 binding domain includes a variable heavy domain and variable light domain selected from the following:
[1178] i) a variable heavy domain of any of the PD-L2 binding domains in FIGS. 29-32, and a variable light domain of any of the PD-L2 binding domains in FIGS. 29-32 or a variant thereof,
[1179] ii) a variable heavy domain and variable light domain of any of the PD-L2 binding domains in FIGS. 29-32 or a variant thereof,
[1180] iii) a variable heavy domain of any of the PD-L2 binding domains in FIGS. 29-32, and a variable light domain having the amino acid sequence of SEQ ID NO:20 (FIG. 24) or a variant thereof, and
[1181] iv) a variable heavy domain and variable light domain of any of the PD-L2 binding domains in FIG. 34 or a variant thereof.

[1182] Any suitable CD28 binding domain can be included in subject dual scFv format antibody, including any of the CD28 binding domains provided herein (see, e.g., FIGS. 35, 37, 38, 41-74 and 81 and the Sequence Listing) or a variant thereof. In some embodiments, the CD28 binding domain includes a variable heavy domain and variable light domain selected from the following:
[1183] i) a variable heavy domain of any of the CD28 binding domains in FIGS. 35, 36, and 38, and a variable light domain of any of the CD28 binding domains in FIGS. 35, 37, and 38 or a variant thereof,
[1184] ii) a variable heavy domain and a variable light domain of any of the CD28 binding domains in FIG. 38 or a variant thereof,
[1185] iii) a variable heavy domain of any of the CD28 binding domains in FIGS. 41-74, and a variable light domain of any of the CD28 binding domains in FIGS. 41-74 or a variant thereof,
[1186] iv) a variable heavy domain and variable light domain of any of the CD28 binding domains in FIGS. 41-74 or a variant thereof,
[1187] v) a variable heavy domain of any of the CD28 binding domains in FIGS. 41-74, and a variable light domain having the amino acid sequence of SEQ ID NO:20 (FIG. 24) or a variant thereof, and
[1188] vi) a variable heavy domain and variable light domain of any of the CD28 binding domains in FIG. 81 or a variant thereof.

[1189] 7. One-Armed scFv-mAb Format

[1190] One heterodimeric antibody format that finds particular use in subject antibodies provided herein (e.g., anti-PD-L1×anti-CD28 and anti-PD-L1×anti-CD28 antibodies) is the one-armed mAb-scFv format shown in FIG. 82G. This format includes: 1) a first monomer that comprises an “empty” Fc domain; 2) a second monomer that includes a first variable heavy domain (VH), a scFv domain (a second antigen binding domain) and an Fc domain, where the scFv domain is attached to the N-terminus of the first variable heavy domain; and 3) a light chain that includes a first variable light domain and a constant light domain. The first variable heavy domain and the first variable light domain form a first antigen binding domain and the scFv is a second antigen binding domain. In this format, one of the first antigen binding domain and second binding domain binds CD28, and the other antigen binding domain binds PD-L1 or PD-L2. As for many of the embodiments herein, these constructs include skew variants, pI variants, ablation variants, additional Fc variants, etc. as desired and described herein.

[1191] Any suitable PD-L1 binding domain can be included in the subject one-armed mAb-scFv format antibody including those provided herein (FIGS. 17, 19, 20, 21, 24-26, and 28 and the Sequence Listing) or a variant thereof. In some embodiments, the PD-L1 binding domain includes a variable heavy domain and variable light domain selected from the following:
[1192] i) a variable heavy domain of any of the PD-L1 variable heavy domains in FIGS. 17 and 19, and a variable light domain of any of the PD-L1 variable light domains in FIGS. 17 and 20 or a variant thereof,
[1193] ii) a variable heavy domain and variable light domain of any of the PD-L1 binding domains in FIGS. 17 and 21 or a variant thereof,
[1194] iii) a variable heavy domain of any of the PD-L1 binding domains in FIGS. 25 and 26, and a variable light domain of any of the PD-L1 binding domains in FIGS. 25 and 26 or a variant thereof,
[1195] iv) a variable heavy domain and variable light domain of any of the PD-L1 binding domains in FIGS. 25 and 26 or a variant thereof,
[1196] v) a variable heavy domain of any of the PD-L1 binding domains in FIGS. 25 and 26, and a variable light domain having the amino acid sequence of SEQ ID NO:20 (FIG. 24) or a variant thereof, and
[1197] vi) a variable heavy domain and variable light domain of any of the PD-L1 binding domains in FIG. 28 or a variant thereof.

[1198] Any suitable PD-L2 binding domain can be included in the subject one-armed mAb-scFv format antibody including those provided herein (FIGS. 29-34 and the Sequence Listing) or a variant thereof. In some embodiments, the PD-L2 binding domain includes a variable heavy domain and variable light domain selected from the following:
[1199] i) a variable heavy domain of any of the PD-L2 binding domains in FIGS. 29-32, and a variable light domain of any of the PD-L2 binding domains in FIGS. 29-32 or a variant thereof,
[1200] ii) a variable heavy domain and variable light domain of any of the PD-L2 binding domains in FIGS. 29-32 or a variant thereof,
[1201] iii) a variable heavy domain of any of the PD-L2 binding domains in FIGS. 29-32, and a variable light domain having the amino acid sequence of SEQ ID NO:20 (FIG. 24) or a variant thereof, and
[1202] iv) a variable heavy domain and variable light domain of any of the PD-L2 binding domains in FIG. 34 or a variant thereof.

[1203] Any suitable CD28 binding domain can be included in subject one-armed mAb-scFv format antibody, including any of the CD28 binding domains provided herein (see, e.g., FIGS. 35, 37, 38, 41-74 and 81 and the Sequence Listing) or a variant thereof. In some embodiments, the CD28 binding domain includes a variable heavy domain and variable light domain selected from the following:
[1204] i) a variable heavy domain of any of the CD28 binding domains in FIGS. 35, 36, and 38, and a variable light domain of any of the CD28 binding domains in FIGS. 35, 37, and 38 or a variant thereof,
[1205] ii) a variable heavy domain and a variable light domain of any of the CD28 binding domains in FIG. 38 or a variant thereof,
[1206] iii) a variable heavy domain of any of the CD28 binding domains in FIGS. 41-74, and a variable light domain of any of the CD28 binding domains in FIGS. 41-74 or a variant thereof,
[1207] iv) a variable heavy domain and variable light domain of any of the CD28 binding domains in FIGS. 41-74 or a variant thereof,
[1208] v) a variable heavy domain of any of the CD28 binding domains in FIGS. 41-74, and a variable light domain having the amino acid sequence of SEQ ID NO:20 (FIG. 24) or a variant thereof, and
[1209] vi) a variable heavy domain and variable light domain of any of the CD28 binding domains in FIG. 81 or a variant thereof.

[1210] 8. scFv-mAb Format

[1211] One heterodimeric antibody format that finds particular use in subject antibodies provided herein (e.g., anti-PD-L1×anti-CD28 and anti-PD-L1×anti-CD28 antibodies) is the scFv-mAb format shown in FIG. 82H. In this embodiment, the format relies on the use of a N-terminal attachment of a scFv to one of the monomers, thus forming a third antigen binding domain, wherein the Fab portions of the two monomers each bind one target and the “extra” scFv domain binds a different target.

[1212] In this embodiment, the first monomer comprises a first heavy chain (comprising a variable heavy domain and a constant domain), with a N-terminally covalently attached scFv comprising a scFv variable light domain, an scFv linker and a scFv variable heavy domain in either orientation ((vh1-scFv linker-vl1-[optional domain linker]-vh2-CH1-hinge-CH2-CH3) or (with the scFv in the opposite orientation) ((vl1-scFv linker-vh1-[optional domain linker]-vh2-CH1-hinge-CH2-CH3)). The second monomer comprises a heavy chain VH2-CH1-hinge-CH2-CH3. This embodiment further utilizes a common light chain comprising a variable light domain and a constant light domain, that associates with the heavy chains to form two identical Fabs. As for many of the embodiments herein, these constructs include skew variants, pI variants, ablation variants, additional Fc variants, etc. as desired and described herein.

[1213] Any suitable PD-L1 binding domain can be included in the subject scFv-mAb format antibody including those provided herein (FIGS. 17, 19, 20, 21, 24-26, and 28 and the Sequence Listing) or a variant thereof. In some embodiments, the PD-L1 binding domain includes a variable heavy domain and variable light domain selected from the following:
[1214] i) a variable heavy domain of any of the PD-L1 variable heavy domains in FIGS. 17 and 19, and a variable light domain of any of the PD-L1 variable light domains in FIGS. 17 and 20 or a variant thereof,
[1215] ii) a variable heavy domain and variable light domain of any of the PD-L1 binding domains in FIGS. 17 and 21 or a variant thereof,
[1216] iii) a variable heavy domain of any of the PD-L1 binding domains in FIGS. 25 and 26, and a variable light domain of any of the PD-L1 binding domains in FIGS. 25 and 26 or a variant thereof,
[1217] iv) a variable heavy domain and variable light domain of any of the PD-L1 binding domains in FIGS. 25 and 26 or a variant thereof,
[1218] v) a variable heavy domain of any of the PD-L1 binding domains in FIGS. 25 and 26, and a variable light domain having the amino acid sequence of SEQ ID NO:20 (FIG. 24) or a variant thereof, and
[1219] vi) a variable heavy domain and variable light domain of any of the PD-L1 binding domains in FIG. 28 or a variant thereof.

[1220] Any suitable PD-L2 binding domain can be included in the subject scFv-mAb format antibody including those provided herein (FIGS. 29-34 and the Sequence Listing) or a variant thereof. In some embodiments, the PD-L2 binding domain includes a variable heavy domain and variable light domain selected from the following:
[1221] i) a variable heavy domain of any of the PD-L2 binding domains in FIGS. 29-32, and a variable light domain of any of the PD-L2 binding domains in FIGS. 29-32 or a variant thereof,
[1222] ii) a variable heavy domain and variable light domain of any of the PD-L2 binding domains in FIGS. 29-32 or a variant thereof,
[1223] iii) a variable heavy domain of any of the PD-L2 binding domains in FIGS. 29-32, and a variable light domain having the amino acid sequence of SEQ ID NO:20 (FIG. 24) or a variant thereof, and
[1224] iv) a variable heavy domain and variable light domain of any of the PD-L2 binding domains in FIG. 34 or a variant thereof.

[1225] Any suitable CD28 binding domain can be included in subject scFv-mAb format antibody, including any of the CD28 binding domains provided herein (see, e.g., FIGS. 35, 37, 38, 41-74 and 81 and the Sequence Listing) or a variant thereof. In some embodiments, the CD28 binding domain includes a variable heavy domain and variable light domain selected from the following:
[1226] i) a variable heavy domain of any of the CD28 binding domains in FIGS. 35, 36, and 38, and a variable light domain of any of the CD28 binding domains in FIGS. 35, 37, and 38 or a variant thereof,
[1227] ii) a variable heavy domain and a variable light domain of any of the CD28 binding domains in FIG. 38 or a variant thereof,
[1228] iii) a variable heavy domain of any of the CD28 binding domains in FIGS. 41-74, and a variable light domain of any of the CD28 binding domains in FIGS. 41-74 or a variant thereof,
[1229] iv) a variable heavy domain and variable light domain of any of the CD28 binding domains in FIGS. 41-74 or a variant thereof,
[1230] v) a variable heavy domain of any of the CD28 binding domains in FIGS. 41-74, and a variable light domain having the amino acid sequence of SEQ ID NO:20 (FIG. 24) or a variant thereof, and
[1231] vi) a variable heavy domain and variable light domain of any of the CD28 binding domains in FIG. 81 or a variant thereof.

[1232] 9. Non-Heterodimeric Bispecific Antibodies

[1233] As will be appreciated by those in the art, the subject antibodies provided herein (e.g., anti-PD-L1×anti-CD28 and anti-PD-L1×anti-CD28 antibodies) provided herein can also be included in non-heterodimeric bispecific formats (see FIG. 82I). In this format, the anti-CD28×anti-T anti-PD-L1×anti-CD28 and anti-PD-L1×anti-CD28 antibodies include: 1) a first monomer comprising a VH1-CH1-hinge-CH2-CH3; 2) a second monomer comprising a VH2-CH1-hinge-CH2-CH3; 3) a first light chain comprising a VL1-CL; and 4) a second light chain comprising a VL2-CL. In such embodiments, the VH1 and VL1 form a first antigen binding domain and VH2 and VL2 form a second antigen binding domain. One of the first or second antigen binding domains binds CD28 and the other antigen binding domain binds PD-L1 or PD-L2.

[1234] Any suitable PD-L1 binding domain can be included in the subject non-heterodimeric bispecific format antibody including those provided herein (FIGS. 17, 19, 20, 21, 24-26, and 28 and the Sequence Listing) or a variant thereof. In some embodiments, the PD-L1 binding domain includes a variable heavy domain and variable light domain selected from the following:
[1235] i) a variable heavy domain of any of the PD-L1 variable heavy domains in FIGS. 17 and 19, and a variable light domain of any of the PD-L1 variable light domains in FIGS. 17 and 20 or a variant thereof,
[1236] ii) a variable heavy domain and variable light domain of any of the PD-L1 binding domains in FIGS. 17 and 21 or a variant thereof,
[1237] iii) a variable heavy domain of any of the PD-L1 binding domains in FIGS. 25 and 26, and a variable light domain of any of the PD-L1 binding domains in FIGS. 25 and 26 or a variant thereof,
[1238] iv) a variable heavy domain and variable light domain of any of the PD-L1 binding domains in FIGS. 25 and 26 or a variant thereof,
[1239] v) a variable heavy domain of any of the PD-L1 binding domains in FIGS. 25 and 26, and a variable light domain having the amino acid sequence of SEQ ID NO:20 (FIG. 24) or a variant thereof, and
[1240] vi) a variable heavy domain and variable light domain of any of the PD-L1 binding domains in FIG. 28 or a variant thereof.

[1241] Any suitable PD-L2 binding domain can be included in the subject non-heterodimeric bispecific antibody including those provided herein (FIGS. 29-34 and the Sequence Listing) or a variant thereof. In some embodiments, the PD-L2 binding domain includes a variable heavy domain and variable light domain selected from the following:
[1242] i) a variable heavy domain of any of the PD-L2 binding domains in FIGS. 29-32, and a variable light domain of any of the PD-L2 binding domains in FIGS. 29-32 or a variant thereof,
[1243] ii) a variable heavy domain and variable light domain of any of the PD-L2 binding domains in FIGS. 29-32 or a variant thereof,
[1244] iii) a variable heavy domain of any of the PD-L2 binding domains in FIGS. 29-32, and a variable light domain having the amino acid sequence of SEQ ID NO:20 (FIG. 24) or a variant thereof, and
[1245] iv) a variable heavy domain and variable light domain of any of the PD-L2 binding domains in FIG. 34 or a variant thereof.

[1246] Any suitable CD28 binding domain can be included in subject non-heterodimeric bispecific format antibody, including any of the CD28 binding domains provided herein (see, e.g., FIGS. 35, 37, 38, 41-74 and 81 and the Sequence Listing) or a variant thereof. In some embodiments, the CD28 binding domain includes a variable heavy domain and variable light domain selected from the following:
[1247] i) a variable heavy domain of any of the CD28 binding domains in FIGS. 35, 36, and 38, and a variable light domain of any of the CD28 binding domains in FIGS. 35, 37, and 38 or a variant thereof,
[1248] ii) a variable heavy domain and a variable light domain of any of the CD28 binding domains in FIG. 38 or a variant thereof,
[1249] iii) a variable heavy domain of any of the CD28 binding domains in FIGS. 41-74, and a variable light domain of any of the CD28 binding domains in FIGS. 41-74 or a variant thereof,
[1250] iv) a variable heavy domain and variable light domain of any of the CD28 binding domains in FIGS. 41-74 or a variant thereof,
[1251] v) a variable heavy domain of any of the CD28 binding domains in FIGS. 41-74, and a variable light domain having the amino acid sequence of SEQ ID NO:20 (FIG. 24) or a variant thereof, and
[1252] vi) a variable heavy domain and variable light domain of any of the CD28 binding domains in FIG. 81 or a variant thereof.

[1253] 10. One-Armed Central-scFv

[1254] One heterodimeric antibody format that finds particular use in subject antibodies (e.g., anti-PD-L1×anti-CD28 and anti-PD-L1×anti-CD28 antibodies) provided herein is the one-armed central-scFv format shown in FIG. 82J. In this embodiment, one monomer comprises just an Fc domain, while the other monomer includes a Fab domain (a first antigen binding domain), a scFv domain (a second antigen binding domain) and an Fc domain, where the scFv domain is inserted between the Fc domain and the Fc domain.

[1255] In this embodiment, one monomer comprises a first heavy chain comprising a first variable heavy domain, a CH1 domain and Fc domain, with a scFv comprising a scFv variable light domain, an scFv linker and a scFv variable heavy domain. The scFv is covalently attached between the C-terminus of the CH1 domain of the heavy constant domain and the N-terminus of the first Fc domain using domain linkers, in either orientation, VH1-CH1-[optional domain linker]-VH2-scFv linker-VL2-[optional domain linker]-CH2-CH3 or VH1-CH1-[optional domain linker]-VL2-scFv linker-VH2-[optional domain linker]-CH2-CH3. The second monomer comprises an Fc domain (CH2-CH3). This embodiment further utilizes a light chain comprising a variable light domain and a constant light domain, that associates with the heavy chain to form a Fab. As for many of the embodiments herein, these constructs include skew variants, pI variants, ablation variants, additional Fc variants, etc. as desired and described herein.

[1256] Any suitable PD-L1 binding domain can be included in the subject one-armed central-scFv format antibody including those provided herein (FIGS. 17, 19, 20, 21, 24-26, and 28 and the Sequence Listing) or a variant thereof. In some embodiments, the PD-L1 binding domain includes a variable heavy domain and variable light domain selected from the following:
[1257] i) a variable heavy domain of any of the PD-L1 variable heavy domains in FIGS. 17 and 19, and a variable light domain of any of the PD-L1 variable light domains in FIGS. 17 and 20 or a variant thereof,
[1258] ii) a variable heavy domain and variable light domain of any of the PD-L1 binding domains in FIGS. 17 and 21 or a variant thereof,
[1259] iii) a variable heavy domain of any of the PD-L1 binding domains in FIGS. 25 and 26, and a variable light domain of any of the PD-L1 binding domains in FIGS. 25 and 26 or a variant thereof,
[1260] iv) a variable heavy domain and variable light domain of any of the PD-L1 binding domains in FIGS. 25 and 26 or a variant thereof,
[1261] v) a variable heavy domain of any of the PD-L1 binding domains in FIGS. 25 and 26, and a variable light domain having the amino acid sequence of SEQ ID NO:20 (FIG. 24) or a variant thereof, and
[1262] vi) a variable heavy domain and variable light domain of any of the PD-L1 binding domains in FIG. 28 or a variant thereof.

[1263] Any suitable PD-L2 binding domain can be included in the subject one-armed central-scFv format antibody including those provided herein (FIGS. 29-34 and the Sequence Listing) or a variant thereof. In some embodiments, the PD-L2 binding domain includes a variable heavy domain and variable light domain selected from the following:
[1264] i) a variable heavy domain of any of the PD-L2 binding domains in FIGS. 29-32, and a variable light domain of any of the PD-L2 binding domains in FIGS. 29-32 or a variant thereof,
[1265] ii) a variable heavy domain and variable light domain of any of the PD-L2 binding domains in FIGS. 29-32 or a variant thereof,
[1266] iii) a variable heavy domain of any of the PD-L2 binding domains in FIGS. 29-32, and a variable light domain having the amino acid sequence of SEQ ID NO:20 (FIG. 24) or a variant thereof, and
[1267] iv) a variable heavy domain and variable light domain of any of the PD-L2 binding domains in FIG. 34 or a variant thereof.

[1268] Any suitable CD28 binding domain can be included in subject one-armed central-scFv format antibody, including any of the CD28 binding domains provided herein (see, e.g., FIGS. 35, 37, 38, 41-74 and 81 and the Sequence Listing) or a variant thereof. In some embodiments, the CD28 binding domain includes a variable heavy domain and variable light domain selected from the following:
[1269] i) a variable heavy domain of any of the CD28 binding domains in FIGS. 35, 36, and 38, and a variable light domain of any of the CD28 binding domains in FIGS. 35, 37, and 38 or a variant thereof,
[1270] ii) a variable heavy domain and a variable light domain of any of the CD28 binding domains in FIG. 38 or a variant thereof,
[1271] iii) a variable heavy domain of any of the CD28 binding domains in FIGS. 41-74, and a variable light domain of any of the CD28 binding domains in FIGS. 41-74 or a variant thereof,
[1272] iv) a variable heavy domain and variable light domain of any of the CD28 binding domains in FIGS. 41-74 or a variant thereof,
[1273] v) a variable heavy domain of any of the CD28 binding domains in FIGS. 41-74, and a variable light domain having the amino acid sequence of SEQ ID NO:20 (FIG. 24) or a variant thereof, and
[1274] vi) a variable heavy domain and variable light domain of any of the CD28 binding domains in FIG. 81 or a variant thereof.

[1275] 11. mAb-Fv Format

[1276] One heterodimeric antibody format that finds particular use in subject antibodies provided herein (e.g., anti-PD-L1×anti-CD28 and anti-PD-L1×anti-CD28 antibodies) is the mAb-Fv format (FIG. 82K). In this embodiment, the format relies on the use of a C-terminal attachment of an “extra” variable heavy domain to one monomer and the C-terminal attachment of an “extra” variable light domain to the other monomer, thus forming a third antigen binding domain (i.e. an “extra” Fv domain), wherein the Fab portions of the two monomers bind PD-L1 or PD-L2 and the “extra” Fv domain binds CD28.

[1277] In this embodiment, the first monomer comprises a first heavy chain, comprising a first variable heavy domain and a first constant heavy domain comprising a first Fc domain, with a first variable light domain covalently attached to the C-terminus of the first Fc domain using a domain linker (vh1-CH1-hinge-CH2-CH3-[optional linker]-vl2). The second monomer comprises a second variable heavy domain, a second constant heavy domain comprising a second Fc domain, and a third variable heavy domain covalently attached to the C-terminus of the second Fc domain using a domain linker (vh1-CH1-hinge-CH2-CH3-[optional linker]-vh2. This embodiment further utilizes a common light chain comprising a variable light domain and a constant light domain, which associates with the heavy chains to form two identical Fabs that include two identical Fvs. The two C-terminally attached variable domains make up the “extra” third Fv. As for many of the embodiments herein, these constructs include skew variants, pI variants, ablation variants, additional Fc variants, etc. as desired and described herein.

[1278] Any suitable PD-L1 binding domain can be included in the subject mAb-Fv format antibody including those provided herein (FIGS. 17, 19, 20, 21, 24-26, and 28 and the Sequence Listing) or a variant thereof. In some embodiments, the PD-L1 binding domain includes a variable heavy domain and variable light domain selected from the following:
[1279] i) a variable heavy domain of any of the PD-L1 variable heavy domains in FIGS. 17 and 19, and a variable light domain of any of the PD-L1 variable light domains in FIGS. 17 and 20 or a variant thereof,
[1280] ii) a variable heavy domain and variable light domain of any of the PD-L1 binding domains in FIGS. 17 and 21 or a variant thereof,
[1281] iii) a variable heavy domain of any of the PD-L1 binding domains in FIGS. 25 and 26, and a variable light domain of any of the PD-L1 binding domains in FIGS. 25 and 26 or a variant thereof,
[1282] iv) a variable heavy domain and variable light domain of any of the PD-L1 binding domains in FIGS. 25 and 26 or a variant thereof,
[1283] v) a variable heavy domain of any of the PD-L1 binding domains in FIGS. 25 and 26, and a variable light domain having the amino acid sequence of SEQ ID NO:20 (FIG. 24) or a variant thereof, and
[1284] vi) a variable heavy domain and variable light domain of any of the PD-L1 binding domains in FIG. 28 or a variant thereof.

[1285] Any suitable PD-L2 binding domain can be included in the subject mAb-Fv format antibody including those provided herein (FIGS. 29-34 and the Sequence Listing) or a variant thereof. In some embodiments, the PD-L2 binding domain includes a variable heavy domain and variable light domain selected from the following:
[1286] i) a variable heavy domain of any of the PD-L2 binding domains in FIGS. 29-32, and a variable light domain of any of the PD-L2 binding domains in FIGS. 29-32 or a variant thereof,
[1287] ii) a variable heavy domain and variable light domain of any of the PD-L2 binding domains in FIGS. 29-32 or a variant thereof,
[1288] iii) a variable heavy domain of any of the PD-L2 binding domains in FIGS. 29-32, and a variable light domain having the amino acid sequence of SEQ ID NO:20 (FIG. 24) or a variant thereof, and
[1289] iv) a variable heavy domain and variable light domain of any of the PD-L2 binding domains in FIG. 34 or a variant thereof.

[1290] Any suitable CD28 binding domain can be included in subject mAb-Fv format antibody, including any of the CD28 binding domains provided herein (see, e.g., FIGS. 35, 37, 38, 41-74 and 81 and the Sequence Listing) or a variant thereof. In some embodiments, the CD28 binding domain includes a variable heavy domain and variable light domain selected from the following:
[1291] i) a variable heavy domain of any of the CD28 binding domains in FIGS. 35, 36, and 38, and a variable light domain of any of the CD28 binding domains in FIGS. 35, 37, and 38 or a variant thereof,
[1292] ii) a variable heavy domain and a variable light domain of any of the CD28 binding domains in FIG. 38 or a variant thereof,
[1293] iii) a variable heavy domain of any of the CD28 binding domains in FIGS. 41-74, and a variable light domain of any of the CD28 binding domains in FIGS. 41-74 or a variant thereof,
[1294] iv) a variable heavy domain and variable light domain of any of the CD28 binding domains in FIGS. 41-74 or a variant thereof,
[1295] v) a variable heavy domain of any of the CD28 binding domains in FIGS. 41-74, and a variable light domain having the amino acid sequence of SEQ ID NO:20 (FIG. 24) or a variant thereof, and
[1296] vi) a variable heavy domain and variable light domain of any of the CD28 binding domains in FIG. 81 or a variant thereof.

[1297] 12. Central-Fv format

[1298] One heterodimeric antibody format that finds particular use in subject antibodies provided herein (e.g., anti-PD-L1×anti-CD28 and anti-PD-L1×anti-CD28 antibodies) is the central-Fv format shown in FIG. 82L. In this embodiment, the format relies on the use of an inserted Fv domain thus forming an “extra” third antigen binding domain, wherein the Fab portions of the two monomers bind PD-L1 or PD-L2 and the “extra” central-Fv domain binds CD28. The Fv domain is inserted between the Fc domain and the CH1-Fv region of the monomers, thus providing a third antigen binding domain, wherein each monomer contains a component of the Fv (e.g. one monomer comprises a variable heavy domain and the other a variable light domain of the “extra” central Fv domain).

[1299] In this embodiment, one monomer comprises a first heavy chain comprising a first variable heavy domain, a CH1 domain, and Fc domain and an additional variable light domain. The additional variable light domain is covalently attached between the C-terminus of the CH1 domain of the heavy constant domain and the N-terminus of the first Fc domain using domain linkers (vh1-CH1-[optional linker]-vl2-hinge-CH2-CH3). The other monomer comprises a first heavy chain comprising a first variable heavy domain, a CH1 domain and Fc domain and an additional variable heavy domain (vh1-CH1-[optional linker]-vh2-hinge-CH2-CH3). The additional variable heavy domain is covalently attached between the C-terminus of the CH1 domain of the heavy constant domain and the N-terminus of the first Fc domain using domain linkers. This embodiment utilizes a common light chain comprising a variable light domain and a constant light domain, that associates with the heavy chains to form two identical Fabs that each bind TROP2. The additional variable heavy domain and additional variable light domain form an “extra” central Fv that binds CD28. As for many of the embodiments herein, these constructs include skew variants, pI variants, ablation variants, additional Fc variants, etc. as desired and described herein.

[1300] Any suitable PD-L1 binding domain can be included in the subject central-Fv format antibody including those provided herein (FIGS. 17, 19, 20, 21, 24-26, and 28 and the Sequence Listing) or a variant thereof. In some embodiments, the PD-L1 binding domain includes a variable heavy domain and variable light domain selected from the following:
[1301] i) a variable heavy domain of any of the PD-L1 variable heavy domains in FIGS. 17 and 19, and a variable light domain of any of the PD-L1 variable light domains in FIGS. 17 and 20 or a variant thereof,
[1302] ii) a variable heavy domain and variable light domain of any of the PD-L1 binding domains in FIGS. 17 and 21 or a variant thereof,
[1303] iii) a variable heavy domain of any of the PD-L1 binding domains in FIGS. 25 and 26, and a variable light domain of any of the PD-L1 binding domains in FIGS. 25 and 26 or a variant thereof,
[1304] iv) a variable heavy domain and variable light domain of any of the PD-L1 binding domains in FIGS. 25 and 26 or a variant thereof,
[1305] v) a variable heavy domain of any of the PD-L1 binding domains in FIGS. 25 and 26, and a variable light domain having the amino acid sequence of SEQ ID NO:20 (FIG. 24) or a variant thereof, and
[1306] vi) a variable heavy domain and variable light domain of any of the PD-L1 binding domains in FIG. 28 or a variant thereof.

[1307] Any suitable PD-L2 binding domain can be included in the subject central-Fv format antibody including those provided herein (FIGS. 29-34 and the Sequence Listing) or a variant thereof. In some embodiments, the PD-L2 binding domain includes a variable heavy domain and variable light domain selected from the following:
[1308] i) a variable heavy domain of any of the PD-L2 binding domains in FIGS. 29-32, and a variable light domain of any of the PD-L2 binding domains in FIGS. 29-32 or a variant thereof,
[1309] ii) a variable heavy domain and variable light domain of any of the PD-L2 binding domains in FIGS. 29-32 or a variant thereof,
[1310] iii) a variable heavy domain of any of the PD-L2 binding domains in FIGS. 29-32, and a variable light domain having the amino acid sequence of SEQ ID NO:20 (FIG. 24) or a variant thereof, and
[1311] iv) a variable heavy domain and variable light domain of any of the PD-L2 binding domains in FIG. 34 or a variant thereof.

[1312] Any suitable CD28 binding domain can be included in subject central-Fv format antibody, including any of the CD28 binding domains provided herein (see, e.g., FIGS. 35, 37, 38, 41-74 and 81 and the Sequence Listing) or a variant thereof. In some embodiments, the CD28 binding domain includes a variable heavy domain and variable light domain selected from the following:
[1313] i) a variable heavy domain of any of the CD28 binding domains in FIGS. 35, 36, and 38, and a variable light domain of any of the CD28 binding domains in FIGS. 35, 37, and 38 or a variant thereof,
[1314] ii) a variable heavy domain and a variable light domain of any of the CD28 binding domains in FIG. 38 or a variant thereof,
[1315] iii) a variable heavy domain of any of the CD28 binding domains in FIGS. 41-74, and a variable light domain of any of the CD28 binding domains in FIGS. 41-74 or a variant thereof,
[1316] iv) a variable heavy domain and variable light domain of any of the CD28 binding domains in FIGS. 41-74 or a variant thereof,
[1317] v) a variable heavy domain of any of the CD28 binding domains in FIGS. 41-74, and a variable light domain having the amino acid sequence of SEQ ID NO:20 (FIG. 24) or a variant thereof, and
[1318] vi) a variable heavy domain and variable light domain of any of the CD28 binding domains in FIG. 81 or a variant thereof.

[1319] 13. Trident Format

[1320] In some embodiments, the subject antibodies provided herein (e.g., anti-PD-L1×anti-CD28 and anti-PD-L1×anti-CD28 antibodies) are in the “Trident” format as generally described in WO2015/184203, hereby expressly incorporated by reference in its entirety and in particular for the Figures, Legends, definitions and sequences of “Heterodimer-Promoting Domains” or “HPDs”, including “K-coil” and “E-coil” sequences. Tridents rely on using two different HPDs that associate to form a heterodimeric structure as a component of the structure, see FIG. 82M. In this embodiment, the Trident format include a “traditional” heavy and light chain (e.g. VH1-CH1-hinge-CH2-CH3 and VL1-CL), a third chain comprising a first “diabody-type binding domain” or “DART®”, VH2-(linker)-VL3-HPD1 and a fourth chain comprising a second DART®, VH3-(linker)-(linker)-VL2-HPD2. The VH1 and VL1 form a first ABD, the VH2 and VL2 form a second ABD, and the VH3 and VL3 form a third ABD. In some cases, as is shown in FIG. 82M, the second and third ABDs bind the same antigen.

[1321] Any suitable PD-L1 binding domain can be included in the subject Trident format antibody including those provided herein (FIGS. 17, 19, 20, 21, 24-26, and 28 and the Sequence Listing) or a variant thereof. In some embodiments, the PD-L1 binding domain includes a variable heavy domain and variable light domain selected from the following:
[1322] i) a variable heavy domain of any of the PD-L1 variable heavy domains in FIGS. 17 and 19, and a variable light domain of any of the PD-L1 variable light domains in FIGS. 17 and 20 or a variant thereof,
[1323] ii) a variable heavy domain and variable light domain of any of the PD-L1 binding domains in FIGS. 17 and 21 or a variant thereof,
[1324] iii) a variable heavy domain of any of the PD-L1 binding domains in FIGS. 25 and 26, and a variable light domain of any of the PD-L1 binding domains in FIGS. 25 and 26 or a variant thereof,
[1325] iv) a variable heavy domain and variable light domain of any of the PD-L1 binding domains in FIGS. 25 and 26 or a variant thereof,
[1326] v) a variable heavy domain of any of the PD-L1 binding domains in FIGS. 25 and 26, and a variable light domain having the amino acid sequence of SEQ ID NO:20 (FIG. 24) or a variant thereof, and
[1327] vi) a variable heavy domain and variable light domain of any of the PD-L1 binding domains in FIG. 28 or a variant thereof.

[1328] Any suitable PD-L2 binding domain can be included in the subject Trident format antibody including those provided herein (FIGS. 29-34 and the Sequence Listing) or a variant thereof. In some embodiments, the PD-L2 binding domain includes a variable heavy domain and variable light domain selected from the following:
[1329] i) a variable heavy domain of any of the PD-L2 binding domains in FIGS. 29-32, and a variable light domain of any of the PD-L2 binding domains in FIGS. 29-32 or a variant thereof,
[1330] ii) a variable heavy domain and variable light domain of any of the PD-L2 binding domains in FIGS. 29-32 or a variant thereof,
[1331] iii) a variable heavy domain of any of the PD-L2 binding domains in FIGS. 29-32, and a variable light domain having the amino acid sequence of SEQ ID NO:20 (FIG. 24) or a variant thereof, and
[1332] iv) a variable heavy domain and variable light domain of any of the PD-L2 binding domains in FIG. 34 or a variant thereof.

[1333] Any suitable CD28 binding domain can be included in subject Trident format antibody, including any of the CD28 binding domains provided herein (see, e.g., FIGS. 35, 37, 38, 41-74 and 81 and the Sequence Listing) or a variant thereof. In some embodiments, the CD28 binding domain includes a variable heavy domain and variable light domain selected from the following:
[1334] i) a variable heavy domain of any of the CD28 binding domains in FIGS. 35, 36, and 38, and a variable light domain of any of the CD28 binding domains in FIGS. 35, 37, and 38 or a variant thereof,
[1335] ii) a variable heavy domain and a variable light domain of any of the CD28 binding domains in FIG. 38 or a variant thereof,
[1336] iii) a variable heavy domain of any of the CD28 binding domains in FIGS. 41-74, and a variable light domain of any of the CD28 binding domains in FIGS. 41-74 or a variant thereof,
[1337] iv) a variable heavy domain and variable light domain of any of the CD28 binding domains in FIGS. 41-74 or a variant thereof,
[1338] v) a variable heavy domain of any of the CD28 binding domains in FIGS. 41-74, and a variable light domain having the amino acid sequence of SEQ ID NO:20 (FIG. 24) or a variant thereof, and
[1339] vi) a variable heavy domain and variable light domain of any of the CD28 binding domains in FIG. 81 or a variant thereof.

[1340] 14. 1+1+1 stackFab₂-scFv-Fc

[1341] In one aspect, provided herein are novel 1+1+1 stackFab₂-scFv-Fc format antibodies (FIG. 83A). This antibody format includes three antigen binding domains: two Fab portions and an scFv binding domain. Each of the Fab portions include a common variable light chain. This heterodimeric antibody format that finds particular use in the subject trispecific antibodies provided herein (e.g., anti-PD-L1×anti-PD-L2×anti-CD28 antibodies).

[1342] The 1+1+1 stackFab₂-scFv-Fc format includes a first monomer, second monomer and a third monomer (common light chain). The first monomer includes from N-terminal to C-terminal, scFv-linker-CH2-CH3 wherein CH2-CH3 is a first Fc domain. The second monomer includes from N-terminal to C-terminal, VH1-CH1-linker-VH2-CH1-hinge-CH2-CH3 wherein VH1 is a first variable heavy domain, VH2 is a second variable heavy domain, and CH2-CH3 is a second Fc domain. The third monomer includes from N-terminal to C-terminal, VL1-CL, wherein VL1 is a first variable light domain and CL is a constant light domain. Further, the scFv comprises a third VH domain (VH3), a scFv linker, and a second variable light domain (VL2). In this format, the first variable heavy domain and the first variable light domain form a first antigen binding domain, the second variable heavy domain and the first variable light domain form a second antigen binding domain, and the third variable heavy domain and second variable light domain form a third antigen binding domain.

[1343] In some embodiments, this heterodimeric antibody is a trispecific antibody that binds PD-L1, PD-L2, and CD28, wherein each of the first antigen binding domain, second antigen binding domain, and third antigen binding domain is selected from the group consisting of a PD-L1 antigen binding domain, a PD-L2 antigen binding domain, and a CD 28 binding domain.

[1344] In exemplary embodiments, the first and second Fc domains are variant Fc domains. In some embodiments, the first and second Fc domains of the 1+1+1 stackFab₂-scFv-Fc format antibody are variant Fc domains that include heterodimerization skew variants (e.g., a set of amino acid substitutions as shown in FIGS. 4 and 9). Particularly useful heterodimerization skew variants include S364K/E357Q:L368D/K370S; L368D/K370S:S364K; L368E/K370S:S364K; T411T/E360E/Q362E:D401K; L368D/K370S:S364K/E357L; K370S:S364K/E357Q; T366S/L368A/Y407V:T366W and T366S/L368A/Y407V/Y349C:T366W/S354C (EU numbering)). In exemplary embodiments, one of the first or second variant Fc domains includes heterodimerization skew variants L368D/K370S and the other of the first or second variant Fc domains includes heterodimerization skew variants S364K/E357Q, wherein numbering is according to EU numbering. In exemplary embodiments, the first variant Fc domain includes heterodimerization skew variants L368D/K370S and the second variant Fc domain includes heterodimerization skew variants S364K/E357Q, wherein numbering is according to EU numbering. In exemplary embodiments, the first variant Fc domain includes heterodimerization skew variants S364K/E357Q and the second variant Fc domain includes heterodimerization skew variants L368D/K370S, wherein numbering is according to EU numbering.

[1345] In some embodiments, the variant Fc domains include ablation variants (including those shown in FIG. 6). In some embodiments, each of the first and second variant Fc domains include ablation variants E233P/L234V/L235A/G236_/S267K, wherein numbering is according to EU numbering.

[1346] In some embodiments, the constant domain (CH1-hinge-CH2-CH3) of the first monomer includes pI variants (including those shown in FIG. 5). In exemplary embodiments, the constant domain (CH1-hinge-CH2-CH3) of the second monomer includes pI variants N208D/Q295E/N384D/Q418E/N421D, wherein numbering is according to EU numbering.

[1347] In exemplary embodiments, the CH1-hinge-CH2-CH3 of the first monomer comprises amino acid variants S364K/E357Q/E233P/L234V/L235A/G236del/S267K, the second Fc domain comprises amino acid variants L368D/K370S/N208D/Q295E/N384D/Q418E/N421D/E233P/L234V/L235A/G236del/S267K, wherein numbering is according to EU numbering.

[1348] In some embodiments, the scFv of the 1+1+1 stackFab₂-scFv-Fc format antibody provided herein includes a charged scFv linker (including those shown in FIG. 7). In some embodiments, the 1+1 Fab-scFv-Fc format antibody provided herein includes FcRn variants M428L/N434S, wherein numbering is according to EU numbering.

[1349] Any suitable PD-L1 binding domain can be included in the subject 1+1+1 stackFab₂-scFv-Fc format antibody including those provided herein (FIGS. 17, 19, 20, 21, 24-26, and 28 and the Sequence Listing) or a variant thereof. In some embodiments, the PD-L1 binding domain includes a variable heavy domain and variable light domain selected from the following:
[1350] i) a variable heavy domain selected from any of the PD-L1 variable heavy domain in FIGS. 17 and 19, and a variable light domain selected from any of the PD-L1 variable light domain in FIGS. 17 and 20 or a variant thereof,
[1351] ii) a variable heavy domain and variable light domain of any of the PD-L1 binding domains in FIGS. 17 and 21 or a variant thereof,
[1352] iii) a variable heavy domain selected from any of the PD-L1 binding domain in FIGS. 25 and 26, and a variable light domain selected from any of the PD-L1 binding domain in FIGS. 25 and 26 or a variant thereof,
[1353] iv) a variable heavy domain and variable light domain of any of the PD-L1 binding domains in FIGS. 25 and 26 or a variant thereof,
[1354] v) a variable heavy domain selected from any of the PD-L1 binding domains in FIGS. 25 and 26, and a variable light domain having the amino acid sequence of SEQ ID NO:20 (FIG. 24) or a variant thereof,
[1355] vi) a variable heavy domain and variable light domain of a PD-L1 binding domains in FIG. 28 or a variant thereof; and
[1356] vii) a variable heavy domain selected from any of the variable heavy domains in FIG. 161 or a variant thereof, and a variable light domain having the amino acid sequence of SEQ ID NO:3239 or a variant thereof.

[1357] Any suitable PD-L2 binding domain can be included in the subject 1+1+1 stackFab₂-scFv-Fc format antibody including those provided herein (FIGS. 29-34 and the Sequence Listing) or a variant thereof. In some embodiments, the PD-L2 binding domain includes a variable heavy domain and variable light domain selected from the following:
[1358] i) a variable heavy domain selected from any of the PD-L2 binding domain in FIGS. 29-32, and a variable light domain selected from any of the PD-L2 binding domain in FIGS. 29-32 or a variant thereof,
[1359] ii) a variable heavy domain and variable light domain of any of the PD-L2 binding domains in FIGS. 29-32 or a variant thereof,
[1360] iii) a variable heavy domain selected from any of the PD-L2 binding domain in FIGS. 29-32, and a variable light domain having the amino acid sequence of SEQ ID NO:20 (FIG. 24) or a variant thereof,
[1361] iv) a variable heavy domain and variable light domain of any of the PD-L2 binding domains in FIG. 34 or a variant thereof,
[1362] v) a variable heavy domain selected from any of the variable heavy domains in FIG. 162 or a variant thereof, and a variable light domain having the amino acid sequence of SEQ ID NO:3239 or a variant thereof.

[1363] Any suitable CD28 binding domain can be included in subject 1+1+1 stackFab₂-scFv-Fc format antibody, including any of the CD28 binding domains provided herein (see, e.g., FIGS. 35, 37, 38, 41-74 and 81 and the Sequence Listing) or a variant thereof. In some embodiments, the CD28 binding domain includes a variable heavy domain and variable light domain selected from the following:
[1364] i) a variable heavy domain selected from any of the CD28 binding domains in FIGS. 35, 36, and 38, and a variable light domain selected from any of the CD28 binding domains in FIGS. 35, 37, and 38 or a variant thereof,
[1365] ii) a variable heavy domain and a variable light domain selected from any of the of the CD28 binding domains in FIG. 38 or a variant thereof,
[1366] iii) a variable heavy domain of any of the CD28 binding domains in FIGS. 41-74, and a variable light domain selected from any of the CD28 binding domains in FIGS. 41-74 or a variant thereof,
[1367] iv) a variable heavy domain and variable light domain of any of the CD28 binding domains in FIGS. 41-74 or a variant thereof,
[1368] v) a variable heavy domain selected from any of the CD28 binding domains in FIGS. 41-74, and a variable light domain having the amino acid sequence of SEQ ID NO:20 (FIG. 24) or a variant thereof,
[1369] vi) a variable heavy domain and variable light domain of any of the CD28 binding domains in FIG. 81 or a variant thereof, and
[1370] vii) a variable heavy domain selected from any of the variable heavy domains in FIG. 163 or a variant thereof, and a variable light domain of selected from any of the variable light domains in FIGS. 35 and 37, or a variable light domain having the amino acid sequence of SEQ ID NO:3239 or a variant thereof.

[1371] FIG. 88 provides exemplary anti-PD-L1×anti-PD-L2×anti-CD28 trispecific antibodies in the 1+1+1 stackFab₂-scFv-Fc format.

[1372] 15. 1+1+1 Fab-(Fab-scFv)-Fc

[1373] In one aspect, provided herein are novel 1+1+1 Fab-(Fab-scFv)-Fc format antibodies (FIG. 83B). This antibody format includes three antigen binding domains: two Fab portions and an scFv binding domain. Each of the Fab portions include a common variable light chain. This heterodimeric antibody format that finds particular use in the subject trispecific antibodies provided herein (e.g., anti-PD-L1×anti-PD-L2×anti-CD28 antibodies).

[1374] The 1+1+1 Fab-(Fab-scFv)-Fc format includes a first monomer, second monomer and a third monomer (common light chain). The first monomer includes from N-terminal to C-terminal, VH1-CH1-linker-scFv-linker-CH2-CH3 wherein VH1 is a first variable heavy domain, and CH2-CH3 is a first Fe domain. The second monomer includes from N-terminal to C-terminal, VH2-CH1-hinge-CH2-CH3 wherein VH2 is a second variable heavy domain, and CH2-CH3 is a second Fc domain. The common light chain comprising, from N-terminal to C-terminal, VL1-CL, wherein VL is a first variable light domain and CL is a constant light domain. In this format, the scFv comprises a third VH domain (VH3), a scFv linker, and a second variable light domain (VL2). Further, the first variable heavy domain and the first variable light domain form a first antigen binding domain, the second variable heavy domain and the first variable light domain form a second antigen binding domain, and the third variable heavy domain and second variable light domain form a third antigen binding domain.

[1375] In some embodiments, this heterodimeric antibody is a trispecific antibody that binds PD-L1, PD-L2, and CD28, wherein each of the first antigen binding domain, second antigen binding domain, and third antigen binding domain is selected from the group consisting of a PD-L1 antigen binding domain, a PD-L2 antigen binding domain, and a CD28 binding domain.

[1376] In exemplary embodiments, the first and second Fc domains are variant Fc domains. In some embodiments, the first and second Fc domains of the 1+1+1 Fab-(Fab-scFv)-Fc format antibody are variant Fc domains that include heterodimerization skew variants (e.g., a set of amino acid substitutions as shown in FIGS. 4 and 9). Particularly useful heterodimerization skew variants include S364K/E357Q:L368D/K370S; L368D/K370S:S364K; L368E/K370S:S364K; T411T/E360E/Q362E:D401K; L368D/K370S:S364K/E357L; K370S:S364K/E357Q; T366S/L368A/Y407V:T366W and T366S/L368A/Y407V/Y349C:T366W/S354C (EU numbering)). In exemplary embodiments, one of the first or second variant Fc domains includes heterodimerization skew variants L368D/K370S and the other of the first or second variant Fc domains includes heterodimerization skew variants S364K/E357Q, wherein numbering is according to EU numbering. In exemplary embodiments, the first variant Fc domain includes heterodimerization skew variants L368D/K370S and the second variant Fc domain includes heterodimerization skew variants S364K/E357Q, wherein numbering is according to EU numbering. In exemplary embodiments, the first variant Fc domain includes heterodimerization skew variants S364K/E357Q and the second variant Fc domain includes heterodimerization skew variants L368D/K370S, wherein numbering is according to EU numbering.

[1377] In some embodiments, the variant Fc domains include ablation variants (including those shown in FIG. 6). In some embodiments, each of the first and second variant Fc domains include ablation variants E233P/L234V/L235A/G236_/S267K, wherein numbering is according to EU numbering.

[1378] In some embodiments, the constant domain (CH1-hinge-CH2-CH3) of the first monomer includes pI variants (including those shown in FIG. 5). In exemplary embodiments, the constant domain (CH1-hinge-CH2-CH3) of the second monomer includes pI variants N208D/Q295E/N384D/Q418E/N421D, wherein numbering is according to EU numbering.

[1379] In exemplary embodiments, the CH1-hinge-CH2-CH3 of the first monomer comprises amino acid variants S364K/E357Q/E233P/L234V/L235A/G236del/S267K, the second Fc domain comprises amino acid variants L368D/K370S/N208D/Q295E/N384D/Q418E/N421D/E233P/L234V/L235A/G236del/S267K, wherein numbering is according to EU numbering.

[1380] In some embodiments, the scFv of the 1+1+1 Fab-(Fab-scFv)-Fc format antibody provided herein includes a charged scFv linker (including those shown in FIG. 7). In some embodiments, the 1+1 Fab-scFv-Fc format antibody provided herein includes FcRn variants M428L/N434S, wherein numbering is according to EU numbering.

[1381] Any suitable PD-L1 binding domain can be included in the subject 1+1+1 Fab-(Fab-scFv)-Fc format antibody including those provided herein (FIGS. 17, 19, 20, 21, 24-26, and 28 and the Sequence Listing) or a variant thereof. In some embodiments, the PD-L1 binding domain includes a variable heavy domain and variable light domain selected from the following:
[1382] i) a variable heavy domain selected from any of the PD-L1 variable heavy domain in FIGS. 17 and 19, and a variable light domain selected from any of the PD-L1 variable light domain in FIGS. 17 and 20 or a variant thereof,
[1383] ii) a variable heavy domain and variable light domain of any of the PD-L1 binding domains in FIGS. 17 and 21 or a variant thereof,
[1384] iii) a variable heavy domain selected from any of the PD-L1 binding domain in FIGS. 25 and 26, and a variable light domain selected from any of the PD-L1 binding domain in FIGS. 25 and 26 or a variant thereof,
[1385] iv) a variable heavy domain and variable light domain of any of the PD-L1 binding domains in FIGS. 25 and 26 or a variant thereof,
[1386] v) a variable heavy domain selected from any of the PD-L1 binding domains in FIGS. 25 and 26, and a variable light domain having the amino acid sequence of SEQ ID NO:20 (FIG. 24) or a variant thereof,
[1387] vi) a variable heavy domain and variable light domain of a PD-L1 binding domains in FIG. 28 or a variant thereof; and
[1388] vii) a variable heavy domain selected from any of the variable heavy domains in FIG. 161 or a variant thereof, and a variable light domain having the amino acid sequence of SEQ ID NO:3239 or a variant thereof.

[1389] Any suitable PD-L2 binding domain can be included in the subject 1+1+1 Fab-(Fab-scFv)-Fc format antibody including those provided herein (FIGS. 29-34 and the Sequence Listing) or a variant thereof. In some embodiments, the PD-L2 binding domain includes a variable heavy domain and variable light domain selected from the following:
[1390] i) a variable heavy domain selected from any of the PD-L2 binding domain in FIGS. 29-32, and a variable light domain selected from any of the PD-L2 binding domain in FIGS. 29-32 or a variant thereof,
[1391] ii) a variable heavy domain and variable light domain of any of the PD-L2 binding domains in FIGS. 29-32 or a variant thereof,
[1392] iii) a variable heavy domain selected from any of the PD-L2 binding domain in FIGS. 29-32, and a variable light domain having the amino acid sequence of SEQ ID NO:20 (FIG. 24) or a variant thereof,
[1393] iv) a variable heavy domain and variable light domain of any of the PD-L2 binding domains in FIG. 34 or a variant thereof,
[1394] v) a variable heavy domain selected from any of the variable heavy domains in FIG. 162 or a variant thereof, and a variable light domain having the amino acid sequence of SEQ ID NO:3239 or a variant thereof.

[1395] Any suitable CD28 binding domain can be included in subject 1+1+1 Fab-(Fab-scFv)-Fc format antibody, including any of the CD28 binding domains provided herein (see, e.g., FIGS. 35, 37, 38, 41-74 and 81 and the Sequence Listing) or a variant thereof. In some embodiments, the CD28 binding domain includes a variable heavy domain and variable light domain selected from the following:
[1396] i) a variable heavy domain selected from any of the CD28 binding domains in FIGS. 35, 36, and 38, and a variable light domain selected from any of the CD28 binding domains in FIGS. 35, 37, and 38 or a variant thereof,
[1397] ii) a variable heavy domain and a variable light domain selected from any of the of the CD28 binding domains in FIG. 38 or a variant thereof,
[1398] iii) a variable heavy domain of any of the CD28 binding domains in FIGS. 41-74, and a variable light domain selected from any of the CD28 binding domains in FIGS. 41-74 or a variant thereof,
[1399] iv) a variable heavy domain and variable light domain of any of the CD28 binding domains in FIGS. 41-74 or a variant thereof,
[1400] v) a variable heavy domain selected from any of the CD28 binding domains in FIGS. 41-74, and a variable light domain having the amino acid sequence of SEQ ID NO:20 (FIG. 24) or a variant thereof,
[1401] vi) a variable heavy domain and variable light domain of any of the CD28 binding domains in FIG. 81 or a variant thereof, and
[1402] vii) a variable heavy domain selected from any of the variable heavy domains in FIG. 163 or a variant thereof, and a variable light domain of selected from any of the variable light domains in FIGS. 35 and 37, or a variable light domain having the amino acid sequence of SEQ ID NO:3239 or a variant thereof.

[1403] FIG. 89 provides exemplary anti-PD-L1×anti-PD-L2×anti-CD28 trispecific antibodies in the 1+1+1 Fab-(Fab-scFv)-Fc format.

[1404] 16. 1+1+1 mAb-scFv

[1405] In one aspect, provided herein are novel 1+1+1 mAb-scFv format antibodies (FIG. 83C). This antibody format includes three antigen binding domains: two Fab portions and an scFv that is attached to the C-terminal of one of the heavy chains. This heterodimeric antibody format that finds particular use in the subject trispecific antibodies provided herein (e.g., anti-PD-L1×anti-PD-L2×anti-CD28 antibodies). In some embodiments of this format, the Fab portions each bind PD-L1 and PD-L2. In some embodiments, the “extra” scFv domain binds CD28. That is, this mAb-scFv format is a trivalent antibody.

[1406] The 1+1+1 mAb-scFv format antibody generally includes a first monomer, a second monomer, and a third monomer (common light chain). The first monomer includes from N-terminal to C-terminal, VH1-CH1-hinge-CH2-CH3-domain linker-scFv, wherein VH1 is a first variable heavy domain, and CH2-CH3 is a first Fc domain. The second monomer includes from N-terminal to C-terminal, a VH2-CH1-hinge-CH2-CH3, wherein VH2 is a second variable heavy domain and CH2-CH3 is a second Fc domain. The common light chain includes from N-terminal to C-terminal, VL1-CL, wherein VL1 is a first variable light domain and CL is a constant light domain. In this format, the scFv comprises a second VH3 domain (VH3), a scFv linker, and a second variable light domain (VL2). Further, the VH1 and VL1 forms a first antigen binding domain (ABD), VH2 and VL1 form a second ABD, and VH3 and VL2 form a third antigen binding domain.

[1407] In some embodiments, this heterodimeric antibody is a trispecific antibody that binds PD-L1, PD-L2, and CD28, wherein each of the first antigen binding domain, second antigen binding domain, and third antigen binding domain is selected from the group consisting of a PD-L1 antigen binding domain, a PD-L2 antigen binding domain, and a CD 28 binding domain.

[1408] In exemplary embodiments, the first and second Fc domains are variant Fc domains. In some embodiments, the first and second Fc domains of the 1+1+1 mAb-scFv format antibody are variant Fc domains that include heterodimerization skew variants (e.g., a set of amino acid substitutions as shown in FIGS. 4 and 9). Particularly useful heterodimerization skew variants include S364K/E357Q:L368D/K370S; L368D/K370S: S364K; L368E/K370S:S364K; T411T/E360E/Q362E:D401K; L368D/K370S:S364K/E357L; K370S:S364K/E357Q; T366S/L368A/Y407V:T366W and T366S/L368A/Y407V/Y349C:T366W/S354C (EU numbering)). In exemplary embodiments, one of the first or second variant Fc domains includes heterodimerization skew variants L368D/K370S and the other of the first or second variant Fc domains includes heterodimerization skew variants S364K/E357Q, wherein numbering is according to EU numbering. In exemplary embodiments, the first variant Fc domain includes heterodimerization skew variants L368D/K370S and the second variant Fc domain includes heterodimerization skew variants S364K/E357Q, wherein numbering is according to EU numbering. In exemplary embodiments, the first variant Fc domain includes heterodimerization skew variants S364K/E357Q and the second variant Fc domain includes heterodimerization skew variants L368D/K370S, wherein numbering is according to EU numbering.

[1409] In some embodiments, the variant Fc domains include ablation variants (including those shown in FIG. 6). In some embodiments, each of the first and second variant Fc domains include ablation variants E233P/L234V/L235A/G236_/S267K, wherein numbering is according to EU numbering.

[1410] In some embodiments, the constant domain (CH1-hinge-CH2-CH3) of the second monomer includes pI variants (including those shown in FIG. 5). In exemplary embodiments, the constant domain (CH1-hinge-CH2-CH3) of the second monomer includes pI variants N208D/Q295E/N384D/Q418E/N421D, wherein numbering is according to EU numbering.

[1411] In exemplary embodiments, the CH1-hinge-CH2-CH3 of the first monomer comprises amino acid variants S364K/E357Q/E233P/L234V/L235A/G236del/S267K, the second Fc domain comprises amino acid variants L368D/K370S/N208D/Q295E/N384D/Q418E/N421D/E233P/L234V/L235A/G236del/S267K, wherein numbering is according to EU numbering.

[1412] In some embodiments, the scFv of the 1+1+1 mAb-scFv format antibody provided herein includes a charged scFv linker (including those shown in FIG. 7). In some embodiments, the 1+1 Fab-scFv-Fc format antibody provided herein includes FcRn variants M428L/N434S, wherein numbering is according to EU numbering.

[1413] Any suitable PD-L1 binding domain can be included in the subject 1+1+1 mAb-scFv format antibody including those provided herein (FIGS. 17, 19, 20, 21, 24-26, and 28 and the Sequence Listing) or a variant thereof. In some embodiments of the 2+1 mAb-scFv, the VH1 of the first and second monomer and the VL1 of the common light chain each form a PD-L1 binding domain. In some embodiments, the scFv of the second monomer is a PD-L1 binding domain.

[1414] In some embodiments, the PD-L1 binding domain includes a variable heavy domain and variable light domain selected from the following:
[1415] i) a variable heavy domain selected from any of the PD-L1 variable heavy domain in FIGS. 17 and 19, and a variable light domain selected from any of the PD-L1 variable light domain in FIGS. 17 and 20 or a variant thereof,
[1416] ii) a variable heavy domain and variable light domain of any of the PD-L1 binding domains in FIGS. 17 and 21 or a variant thereof,
[1417] iii) a variable heavy domain selected from any of the PD-L1 binding domain in FIGS. 25 and 26, and a variable light domain selected from any of the PD-L1 binding domain in FIGS. 25 and 26 or a variant thereof,
[1418] iv) a variable heavy domain and variable light domain of any of the PD-L1 binding domains in FIGS. 25 and 26 or a variant thereof,
[1419] v) a variable heavy domain selected from any of the PD-L1 binding domains in FIGS. 25 and 26, and a variable light domain having the amino acid sequence of SEQ ID NO:20 (FIG. 24) or a variant thereof,
[1420] vi) a variable heavy domain and variable light domain of a PD-L1 binding domains in FIG. 28 or a variant thereof; and
[1421] vii) a variable heavy domain selected from any of the variable heavy domains in FIG. 161 or a variant thereof, and a variable light domain having the amino acid sequence of SEQ ID NO:3239 or a variant thereof.

[1422] Any suitable PD-L2 binding domain can be included in the subject 1+1+1 mAb-scFv format antibody including those provided herein (FIGS. 29-34 and the Sequence Listing) or a variant thereof. In some embodiments of the 2+1 mAb-scFv, the VH1 of the first and second monomer and the VL1 of the common light chain each form a PD-L2 binding domain. In some embodiments, the scFv of the second monomer is a PD-L2 binding domain.

[1423] In some embodiments, the PD-L2 binding domain includes a variable heavy domain and variable light domain selected from the following:
[1424] i) a variable heavy domain selected from any of the PD-L2 binding domain in FIGS. 29-32, and a variable light domain selected from any of the PD-L2 binding domain in FIGS. 29-32 or a variant thereof,
[1425] ii) a variable heavy domain and variable light domain of any of the PD-L2 binding domains in FIGS. 29-32 or a variant thereof,
[1426] iii) a variable heavy domain selected from any of the PD-L2 binding domain in FIGS. 29-32, and a variable light domain having the amino acid sequence of SEQ ID NO:20 (FIG. 24) or a variant thereof,
[1427] iv) a variable heavy domain and variable light domain of any of the PD-L2 binding domains in FIG. 34 or a variant thereof,
[1428] v) a variable heavy domain selected from any of the variable heavy domains in FIG. 162 or a variant thereof, and a variable light domain having the amino acid sequence of SEQ ID NO:3239 or a variant thereof.

[1429] Any suitable CD28 binding domain can be included in subject 1+1+1 mAb-scFv format antibody, including any of the CD28 binding domains provided herein (see, e.g., FIGS. 35, 37, 38, 41-74 and 81 and the Sequence Listing) or a variant thereof. In some embodiments, the CD28 binding domain includes a variable heavy domain and variable light domain selected from the following:
[1430] i) a variable heavy domain selected from any of the CD28 binding domains in FIGS. 35, 36, and 38, and a variable light domain selected from any of the CD28 binding domains in FIGS. 35, 37, and 38 or a variant thereof,
[1431] ii) a variable heavy domain and a variable light domain selected from any of the of the CD28 binding domains in FIG. 38 or a variant thereof,
[1432] iii) a variable heavy domain of any of the CD28 binding domains in FIGS. 41-74, and a variable light domain selected from any of the CD28 binding domains in FIGS. 41-74 or a variant thereof,
[1433] iv) a variable heavy domain and variable light domain of any of the CD28 binding domains in FIGS. 41-74 or a variant thereof,
[1434] v) a variable heavy domain selected from any of the CD28 binding domains in FIGS. 41-74, and a variable light domain having the amino acid sequence of SEQ ID NO:20 (FIG. 24) or a variant thereof,
[1435] vi) a variable heavy domain and variable light domain of any of the CD28 binding domains in FIG. 81 or a variant thereof, and
[1436] vii) a variable heavy domain selected from any of the variable heavy domains in FIG. 163 or a variant thereof, and a variable light domain of selected from any of the variable light domains in FIGS. 35 and 37, or a variable light domain having the amino acid sequence of SEQ ID NO:3239 or a variant thereof.

[1437] FIGS. 10 and 11 show some exemplary Fc domain sequences that are useful with the 1+1+1 mAb-scFv format antibody. The “monomer 1” sequences depicted in FIG. 10 typically refer to the Fc domain of the “Fab-Fc heavy chain” and the “monomer 2” sequences refer to the Fc domain of the “Fab-Fc-scFv” heavy chain.” In addition, FIG. 12 provides exemplary CH1 (optionally including hinge or half-hinge domains) that can be used in either the “Fab-Fc heavy chain” monomer or the “Fab-Fc-scFv” heavy chain.” FIG. 13 provides exemplary hinge domains that may be used in either the “Fab-Fc heavy chain” monomer or the “Fab-Fc-scFv” heavy chain.” Further, FIG. 14 provides useful CL sequences that can be used with this format.

[1438] An exemplary anti-PD-L1×anti-CD28×antibody in the 1+1+1 mAb-scFv format is depicted in FIG. 90.

[1439] 17. 1+1+1 stackFab₂-Fab-Fc

[1440] In one aspect, provided herein are novel 1+1+1 stackFab₂-Fab-Fc format antibodies (FIG. 83D). This antibody format includes three antigen binding domains: three Fab portions that each share a common light chain (CLC). This heterodimeric antibody format finds particular use in the subject trispecific antibodies provided herein (e.g., anti-PD-L1×anti-PD-L2×anti-CD28 antibodies).

[1441] This antibody includes a first monomer, a second monomer, and three common light chains that have the same sequence (i.e., a first common light chain, a second common light chain, and a third common light chain). The first monomer includes from N-terminal to C-terminal, VH1-CH1-hinge-CH2-CH3, wherein VH1 is a first variable heavy domain and CH2-CH3 is a first Fc domain. The second monomer includes from N-terminal to C-terminal, VH2-CH1-linker-VH3-CH1-hinge-CH2-CH3 wherein VH2 is a second variable heavy domain, VH3 is a third variable heavy domain, and CH2-CH3 is a second Fc domain. The common light chains each include from N-terminal to C-terminal, VL-CL, wherein VL is a common variable light domain and CL is a constant light domain. In this format, the first variable heavy domain and the common variable light domain of the first common light chain form a first antigen binding domain, the second variable heavy domain and the common variable light domain of the second common light chain form a second antigen binding domain, and the third variable heavy domain and the common variable light domain of the third common light chain form a third antigen binding domain.

[1442] In some embodiments, this heterodimeric antibody is a trispecific antibody that binds PD-L1, PD-L2, and CD28, wherein each of the first antigen binding domain, second antigen binding domain, and third antigen binding domain is selected from the group consisting of a PD-L1 antigen binding domain, a PD-L2 antigen binding domain, and a CD28 binding domain.

[1443] In exemplary embodiments, the first and second Fc domains are variant Fc domains. In some embodiments, the first and second Fc domains of the 1+1+1 stackFab₂-Fab-Fc format antibody are variant Fc domains that include heterodimerization skew variants (e.g., a set of amino acid substitutions as shown in FIGS. 4 and 9). Particularly useful heterodimerization skew variants include S364K/E357Q:L368D/K370S; L368D/K370S:S364K; L368E/K370S:S364K; T411T/E360E/Q362E:D401K; L368D/K370S:S364K/E357L; K370S:S364K/E357Q; T366S/L368A/Y407V:T366W and T366S/L368A/Y407V/Y349C:T366W/S354C (EU numbering)). In exemplary embodiments, one of the first or second variant Fc domains includes heterodimerization skew variants L368D/K370S and the other of the first or second variant Fc domains includes heterodimerization skew variants S364K/E357Q, wherein numbering is according to EU numbering. In exemplary embodiments, the first variant Fe domain includes heterodimerization skew variants L368D/K370S and the second variant Fc domain includes heterodimerization skew variants S364K/E357Q, wherein numbering is according to EU numbering. In exemplary embodiments, the first variant Fc domain includes heterodimerization skew variants S364K/E357Q and the second variant Fc domain includes heterodimerization skew variants L368D/K370S, wherein numbering is according to EU numbering.

[1444] In some embodiments, the variant Fc domains include ablation variants (including those shown in FIG. 6). In some embodiments, each of the first and second variant Fc domains include ablation variants E233P/L234V/L235A/G236_/S267K, wherein numbering is according to EU numbering.

[1445] In some embodiments, the constant domain (CH1-hinge-CH2-CH3) of the second monomer includes pI variants (including those shown in FIG. 5). In exemplary embodiments, the constant domain (CH1-hinge-CH2-CH3) of the first monomer includes pI variants N208D/Q295E/N384D/Q418E/N421D, wherein numbering is according to EU numbering.

[1446] In exemplary embodiments, the CH1-hinge-CH2-CH3 of the first monomer comprises amino acid variants L368D/K370S/N208D/Q295E/N384D/Q418E/N421D/E233P/L234V/L235A/G236del/S267K, the second Fc domain comprises amino acid variants S364K/E357Q/E233P/L234V/L235A/G236del/S267K, wherein numbering is according to EU numbering.

[1447] In some embodiments, the 1+1 Fab-scFv-Fc format antibody provided herein includes FcRn variants M428L/N434S, wherein numbering is according to EU numbering.

[1448] Any suitable PD-L1 binding domain can be included in the subject 1+1+1 stackFab₂-Fab-Fc format antibody format antibody including those provided herein (FIGS. 17, 19, 20, 21, 24-26, and 28 and the Sequence Listing) or a variant thereof. In some embodiments, the PD-L1 binding domain includes a variable heavy domain and variable light domain selected from any of the variable heavy domains and variable light domains depicted in FIGS. 17, 19, 20, 21, 24-26 and 161 or a variant thereof.

[1449] In some embodiments, the PD-L1 binding domain includes a variable heavy domain and variable light domain selected from the following:
[1450] i) a variable heavy domain selected from any of the variable heavy domains in FIG. 161 or a variant thereof, and the “IGKV1-39_L1” variable light domain (SEQ ID NO:3239) or variant thereof,
[1451] ii) a variable heavy domain selected from any of the PD-L1 binding domains in FIGS. 25 and 26 or a variant thereof, and a variable light domain selected from any of the PD-L1 binding domains in FIGS. 25 and 26 or a variant thereof,
[1452] iii) a variable heavy domain and variable light domain of any of the PD-L1 binding domains in FIGS. 25 and 26 or a variant thereof, and
[1453] iv) a variable heavy domain selected from any of the PD-L1 binding domains in FIGS. 25 and 26 or a variant thereof, and a variable light domain having the amino acid sequence of SEQ ID NO:20 (FIG. 24) or a variant thereof.

[1454] In some embodiments, subject 1+1+1 stackFab₂-Fab-Fc format antibody includes a PD-L1 binding domain having a variable heavy domain having the amino acid sequence of SEQ ID NO:3251, and a variable light domain having the amino acid sequence of SEQ ID NO:3239.

[1455] Any suitable PD-L2 binding domain can be included in the subject 1+1+1 stackFab₂-Fab-Fc format antibody format antibody including those provided herein (FIGS. 29-32 and 162 and the Sequence Listing) or a variant thereof. In some embodiments, the PD-L2 binding domain includes a variable heavy domain and variable light domain selected from any of the variable heavy domains and variable light domains depicted in FIGS. 29-32 and 162 or a variant thereof.

[1456] In some embodiments, the PD-L2 binding domain includes a variable heavy domain and variable light domain selected from the following:
[1457] i) a variable heavy domain selected from any of the variable heavy domains in FIG. 162 or a variant thereof, and the “IGKV1-39_L1” variable light domain (SEQ ID NO:3239) or variant thereof,
[1458] ii) a variable heavy domain selected from any of the PD-L2 binding domains in FIGS. 29-32, and a variable light domain of any of the PD-L2 binding domains in FIGS. 29-32 or a variant thereof,
[1459] iii) a variable heavy domain and variable light domain of any of the PD-L2 binding domains in FIGS. 29-32 or a variant thereof, and
[1460] iv) a variable heavy domain selected from any of the PD-L2 binding domains in FIGS. 29-32, and a variable light domain having the amino acid sequence of SEQ ID NO:20 (FIG. 24) or a variant thereof.

[1461] In some embodiments, subject 1+1+1 stackFab₂-Fab-Fc format antibody includes a PD-L2 binding domain having a variable heavy domain having the amino acid sequence of SEQ ID NO:3319, and a variable light domain having the amino acid sequence of SEQ ID NO:3239.

[1462] In some embodiments of the 1+1+1 stackFab₂-Fab-Fc format antibody, one of the antigen binding domain is a CD28 binding domain. Any suitable CD28 binding domain can be included in the subject 2+1 CLC format antibody format antibody including those provided herein (FIGS. 241-47 and the Sequence Listing) or a variant thereof. In some embodiments, the CD28 binding domain includes a variable heavy domain and variable light domain selected from the following:
[1463] i) a variable heavy domain selected from a variable heavy domain in FIG. 163 or a variant thereof, and a variable light domain selected from a variable light domains in FIG. 35 or 37, or the “IGKV1-39_L1” variable light domain (SEQ ID NO:3239) or variant thereof,
[1464] ii) a variable heavy domain of a CD28 binding domain in FIGS. 41-74, and a variable light domain of a CD28 binding domain in FIGS. 41-74 or a variant thereof,
[1465] iii) a variable heavy domain and variable light domain of any of the CD28 binding domains in FIGS. 41-74 or a variant thereof, and
[1466] iv) a variable heavy domain of any of the CD28 binding domains in FIGS. 41-74, and a variable light domain having the amino acid sequence of SEQ ID NO:20 (FIG. 24) or a variant thereof.

[1467] In some embodiments, subject 1+1+1 stackFab₂-Fab-Fc format antibody includes a CD28 binding domain having a variable heavy domain having the amino acid sequence of SEQ ID NO: 3380, and a variable light domain having the amino acid sequence of SEQ ID NO:3239.

[1468] In one aspect, provided herein is an anti-PD-L1×anti-PD-L2×anti-CD28 trispecific antibody in the 1+1+1 stackFab₂-Fab-Fc format that includes the following:
[1469] a) a PD-L1 binding domain having a variable heavy domain having the amino acid sequence of SEQ ID NO:3251, and a variable light domain having the amino acid sequence of SEQ ID NO:3239;
[1470] b) a PD-L2 binding domain having a variable heavy domain having the amino acid sequence of SEQ ID NO:3319, and a variable light domain having the amino acid sequence of SEQ ID NO:3239; and
[1471] c) a CD28 binding domain having a variable heavy domain having the amino acid sequence of SEQ ID NO:3380, and a variable light domain having the amino acid sequence of SEQ ID NO:3239.

[1472] In some embodiments, the anti-PD-L1×anti-PD-L2×anti-CD28 trispecific antibody includes a first monomer having the amino acid sequence of SEQ ID NO:3201, a second monomer having the amino acid sequence of SEQ ID NO:3202; and a light chain having the amino acid sequence of SEQ ID NO:3203.

[1473] Exemplary anti-PD-L1×anti-PD-L2×anti-CD28 trispecific antibodies in the 1+1+1 stackFab₂-Fab-Fc format are depicted in FIG. 91.

[1474] 18. Monospecific, Monoclonal Antibodies

[1475] As will be appreciated by those in the art, the novel CD28, PD-L1, and PD-L2 sequences outlined herein (see Section IV.A-C) can also be used in both monospecific antibodies (e.g., “traditional monoclonal antibodies”) or non-heterodimeric bispecific formats. Accordingly, the present invention provides monoclonal (monospecific) antibodies comprising the 6 CDRs and/or the vh and vl sequences from the figures, generally with IgG1, IgG2, IgG3 or IgG4 constant regions, with IgG1, IgG2 and IgG4 (including IgG4 constant regions comprising a S228P amino acid substitution) finding particular use in some embodiments. That is, any sequence herein with a “H_L” designation can be linked to the constant region of a human IgG1 antibody.

### VI. Nucleic Acids

[1476] In another aspect, provided herein are nucleic acid compositions encoding the antigen binding domains and antibodies provided herein (e.g., bispecific and trispecific antibodies).

[1477] As will be appreciated by those in the art, the nucleic acid compositions will depend on the format and scaffold of the heterodimeric protein. Thus, for example, when the format requires three amino acid sequences, such as for the 1+1 Fab-scFv-Fc, 2+1 Fab₂-scFv-Fc, and 2+1 mAb-scFv formats, three polynucleotides can be incorporated into one or more expression vectors for expression. In exemplary embodiments, each polynucleotide is incorporated into a different expression vector.

[1478] As is known in the art, the nucleic acids encoding the components of the binding domains and antibodies disclosed herein can be incorporated into expression vectors as is known in the art, and depending on the host cells used to produce the heterodimeric antibodies of the invention. Generally the nucleic acids are operably linked to any number of regulatory elements (promoters, origin of replication, selectable markers, ribosomal binding sites, inducers, etc.). The expression vectors can be extra-chromosomal or integrating vectors.

[1479] The polynucleotides and/or expression vectors of the invention are then transformed into any number of different types of host cells as is well known in the art, including mammalian, bacterial, yeast, insect and/or fungal cells, with mammalian cells (e.g., CHO cells), finding use in many embodiments.

[1480] In some embodiments, polynucleotides encoding each monomer are each contained within a single expression vector, generally under different or the same promoter controls. In embodiments of particular use in the present invention, each of these polynucleotides are contained on different expression vectors. As shown herein and in U.S. 62/025,931, hereby incorporated by reference, different vector ratios can be used to drive heterodimer formation. That is, surprisingly, while the proteins comprise first monomer:second monomer:light chains (in the case of many of the embodiments herein that have three polypeptides comprising the heterodimeric antibody) in a 1:1:2 ratio, these are not the ratios that give the best results.

[1481] The antibodies and ABDs provided herein are made by culturing host cells comprising the expression vector(s) as is well known in the art. Once produced, traditional antibody purification steps are done, including an ion exchange chromatography step. As discussed herein, having the pIs of the two monomers differ by at least 0.5 can allow separation by ion exchange chromatography or isoelectric focusing, or other methods sensitive to isoelectric point. That is, the inclusion of pI substitutions that alter the isoelectric point (pI) of each monomer so that such that each monomer has a different pI and the heterodimer also has a distinct pI, thus facilitating isoelectric purification of the “1+1 Fab-scFv-Fc” heterodimer (e.g., anionic exchange columns, cationic exchange columns). These substitutions also aid in the determination and monitoring of any contaminating dual scFv-Fc and mAb homodimers post-purification (e.g., IEF gels, cIEF, and analytical IEX columns).

### VII. Biological and Biochemical Functionality of the Bispecific and Trispecific Antibodies

[1482] Generally the bispecific and trispecific antibodies described herein are administered to patients with cancer (e.g., a PD-L1 or PD-L2 associated cancer or cancer that has been shown to benefit from anti-PD-1, anti-PD-L1, or anti-PD-L2 treatment), and efficacy is assessed, in a number of ways as described herein. Thus, while standard assays of efficacy can be run, such as cancer load, size of tumor, evaluation of presence or extent of metastasis, etc., immuno-oncology treatments can be assessed on the basis of immune status evaluations as well. This can be done in a number of ways, including both in vitro and in vivo assays.

### A. Antibody Compositions for In Vivo Administration

[1483] Formulations of the antibodies used in accordance with the present invention are prepared for storage by mixing an antibody having the desired degree of purity with optional pharmaceutically acceptable carriers, excipients or stabilizers (Remington's Pharmaceutical Sciences 16th edition, Osol, A. Ed. [1980]), in the form of lyophilized formulations or aqueous solutions.

### VIII. Treatments

[1484] Once made, the compositions of the invention find use in a number of oncology applications, by treating cancer, generally by enhancing immune responses (e.g., T cell activation and proliferation), particularly when used with anti-cancer therapies such as anti-PD1 and anti-tumor bispecific antibodies. In some embodiments, the antibodies provided herein enhance immune responses (e.g., T cell activation and proliferation) by providing agonistic co-stimulation of T cells in the microenvironment of tumors expressing PD-L1 and/or PD-L2.

### A. Anti-CD28×Anti-TAA/Anti-TAA Bispecific Antibody

[1485] In some embodiments, the subject bispecific and trispecific antibodies provided herein are administered with an anti-tumor bispecific antibody. In classic T cell/APC interaction, there is a first signal provided by TCR reactivity with peptide-MHC (Signal 1) and a second signal provided by CD28 crosslinking by CD80/CD86 being expressed on APCs (Signal 2) which together fully activate T cells (see FIG. 92A). In contrast, only the first signal is provided in treatment with CD3 bispecific antibodies that target a TAA (i.e., anti-CD3×anti-TAA bispecific antibodies)(see FIG. 92B).

[1486] Without being bound by any particular theory of operation, it is believed that the subject antibodies provided herein can enhance the anti-tumor response of an anti-CD3×anti-TAA bispecific antibody by providing CD28 costimulation and blockage of inhibitory PD-L1:PD-1 or PD-L2:PD-1 pathway interactions (see FIGS. 93 and 94 and Examples). Thus, in one aspect, provided herein are methods of methods of treating a cancer in a patient by administering the patient an anti-CD3×anti-TAA bispecific antibody and a subject bispecific or trispecific antibody provided herein. In some embodiments, the administration of the anti-CD3×anti-TAA bispecific antibody and subject bispecific or trispecific antibody enhances an immune response against the tumor in the patient. CD3 binding domains that can be included in the anti-CD3×anti-TAA bispecific antibodies are included in FIG. 15.

### B. Administrative Modalities

[1487] The antibodies provided herein administered to a subject, in accord with known methods, such as intravenous administration as a bolus or by continuous infusion over a period of time.

### C. Treatment Modalities

[1488] In the methods of the invention, therapy is used to provide a positive therapeutic response with respect to a disease or condition.

[1489] By “positive therapeutic response” is intended an improvement in the disease or condition, and/or an improvement in the symptoms associated with the disease or condition. For example, a positive therapeutic response would refer to one or more of the following improvements in the disease: (1) a reduction in the number of neoplastic cells; (2) an increase in neoplastic cell death; (3) inhibition of neoplastic cell survival; (5) inhibition (i.e., slowing to some extent, preferably halting) of tumor growth; (6) an increased patient survival rate; and (7) some relief from one or more symptoms associated with the disease or condition.

[1490] Positive therapeutic responses in any given disease or condition can be determined by standardized response criteria specific to that disease or condition. Tumor response can be assessed for changes in tumor morphology (i.e., overall tumor burden, tumor size, and the like) using screening techniques such as magnetic resonance imaging (MRI) scan, x-radiographic imaging, computed tomographic (CT) scan, bone scan imaging, endoscopy, and tumor biopsy sampling including bone marrow aspiration (BMA) and counting of tumor cells in the circulation.

[1491] In addition to these positive therapeutic responses, the subject undergoing therapy may experience the beneficial effect of an improvement in the symptoms associated with the disease.

[1492] Treatment according to the present invention includes a “therapeutically effective amount” of the medicaments used. A “therapeutically effective amount” refers to an amount effective, at dosages and for periods of time necessary, to achieve a desired therapeutic result.

[1493] A therapeutically effective amount may vary according to factors such as the disease state, age, sex, and weight of the individual, and the ability of the medicaments to elicit a desired response in the individual. A therapeutically effective amount is also one in which any toxic or detrimental effects of the antibody or antibody portion are outweighed by the therapeutically beneficial effects.

[1494] A “therapeutically effective amount” for tumor therapy may also be measured by its ability to stabilize the progression of disease. The ability of a compound to inhibit cancer may be evaluated in an animal model system predictive of efficacy in human tumors.

[1495] Alternatively, this property of a composition may be evaluated by examining the ability of the compound to inhibit cell growth or to induce apoptosis by in vitro assays known to the skilled practitioner. A therapeutically effective amount of a therapeutic compound may decrease tumor size, or otherwise ameliorate symptoms in a subject. One of ordinary skill in the art would be able to determine such amounts based on such factors as the subject's size, the severity of the subject's symptoms, and the particular composition or route of administration selected.

[1496] Dosage regimens are adjusted to provide the optimum desired response (e.g., a therapeutic response). For example, a single bolus may be administered, several divided doses may be administered over time or the dose may be proportionally reduced or increased as indicated by the exigencies of the therapeutic situation. Parenteral compositions may be formulated in dosage unit form for ease of administration and uniformity of dosage. Dosage unit form as used herein refers to physically discrete units suited as unitary dosages for the subjects to be treated; each unit contains a predetermined quantity of active compound calculated to produce the desired therapeutic effect in association with the required pharmaceutical carrier.

[1497] The specification for the dosage unit forms of the present invention are dictated by and directly dependent on (a) the unique characteristics of the active compound and the particular therapeutic effect to be achieved, and (b) the limitations inherent in the art of compounding such an active compound for the treatment of sensitivity in individuals.

[1498] The efficient dosages and the dosage regimens for the bispecific antibodies used in the present invention depend on the disease or condition to be treated and may be determined by the persons skilled in the art.

[1499] All cited references are herein expressly incorporated by reference in their entirety.

[1500] Whereas particular embodiments of the invention have been described above for purposes of illustration, it will be appreciated by those skilled in the art that numerous variations of the details may be made without departing from the invention as described in the appended claims.

### EXAMPLES

[1501] Examples are provided below to illustrate the present invention. These examples are not meant to constrain the present invention to any particular application or theory of operation. For all constant region positions discussed in the present invention, numbering is according to the EU index as in Kabat (Kabat et al., 1991, Sequences of Proteins of Immunological Interest, 5th Ed., United States Public Health Service, National Institutes of Health, Bethesda, entirely incorporated by reference). Those skilled in the art of antibodies will appreciate that this convention consists of nonsequential numbering in specific regions of an immunoglobulin sequence, enabling a normalized reference to conserved positions in immunoglobulin families. Accordingly, the positions of any given immunoglobulin as defined by the EU index will not necessarily correspond to its sequential sequence.

[1502] General and specific scientific techniques are outlined in US Publications 2015/0307629, 2014/0288275 and WO2014/145806, all of which are expressly incorporated by reference in their entirety and particularly for the techniques outlined therein.

### Background

[1503] While checkpoint blockade immunotherapies have proven to be effective, many patients nonetheless fail to achieve a response. Engagement of T cell costimulatory receptors on TILs (e.g., CD80/CD86) with agonistic antibodies (e.g., anti-CD28 antibodies) could provide an additional positive signal capable of overcoming negative signals of immune checkpoints and may be a useful therapeutic modality to stack with checkpoint blockade.

[1504] The subject bispecific and trispecific antibodies provided herein provide a costimulatory signal for T-cell activation against tumor cells while advantageously also block inhibitory PD-L1:PD1 and/or PD-L2:PD1 pathway interactions.

### Example 1: PDL1 and PDL2 Binding Domains

[1505] Sequences for human, mouse, and cynomolgus PD-L1 and PD-L2 are depicted in FIGS. 1-2 and are useful for the development of cross-reactive PD-L1 and PD-L2 antigen binding domains for ease of clinical development.

[1506] 1A: Novel PDL1 Binding Domain 2G4

[1507] In an initial campaign, numerous novel PDL1 binding domains were generated by hybridoma technology through IMMUNOPRECISE. The amino acid sequences for exemplary humanized hybridoma-derived clone 2G4 are depicted in FIG. 17. anti-PDL1 mAbs were incubated with indicated concentration of huPDL1-mFc fusions. The mixture was then combined with PD-1-expressing HEK293T cells. Cells were stained with anti-mouse Fc and binding was assessed by flow cytometry, data for which are depicted in FIG. 18. The data show that anti-PDL1 clone 2G4 blocks PD1:PDL1 interaction.

[1508] In a second experiment, CD3+ T cells from 11 unique donors were treated with a constant dose of the indicated test articles in the presence of 10,000 dendritic cells. Cytokine secretion was measured using MSD assay (Meso Scale Discovery, Rockville, Md.). The data depicted in FIG. 100 show that anti-PDL1 2G4 induced greater IL-2 and IFNγ release in comparison to the partial-blocking and the non-blocking anti-PDL1 clones.

[1509] Towards optimization of PDL1×CD28 bsAbs as described in Example 5B(a), numerous 2G4 affinity variants were developed by engineering VH variants (illustrative sequences as depicted in FIG. 19 and additional sequences depicted as SEQ ID NOs: 1467-1528), VL variants (illustrative sequences as depicted in FIG. 20 and additional sequences depicted as SEQ ID NOs: 1529-1599), and combinations thereof (illustrative sequences as depicted in FIG. 21). Consensus sequence of the variants are depicted in FIG. 22. Affinity of illustrative variants, in the context of PDL1×CD28 bsAbs having sequences as depicted in FIG. 84, was determined using Biacore. Experimental steps for Biacore generally included the following: Immobilization (capture of ligand onto a sensor chip); Association (flowing of various concentrations of analyte over sensor chip); and Dissociation (flowing buffer over the sensor chips) in order to determine the affinity of the test articles. A reference flow with buffer alone was also included in the method for background correction during data processing. Binding affinities and kinetic rate constants were obtained by analyzing the processed data using a 1:1 binding model. Binding affinity for human and cynomolgus PDL1 determined as such are depicted in FIG. 23.

[1510] 1B: Novel Common Light Chain PDL1 and PDL2 Binding Domains

[1511] To engineer PDL1×PDL2×CD28 triAbs, common light chain formats (i.e. formats utilizing PDL1 and PDL2 binding domains having the same light chain; and in some formats, PDL1, PDL2, and CD28 binding domains having the same light chain) were explored, as multispecific antibody formats utilizing just Fab domains may be less immunogenic and more stable than those utilizing scFv domains.

[1512] 1B(a): Single Cell Technology in Genetically Engineered Mice

[1513] In a first campaign, numerous novel PDL1 and PDL2 binding domains were generated by single cell technology in mouse genetically engineered with complete human heavy chain variable domain combined with a human common light chain substitution in situ (sequence for the common variable light domain is depicted in FIG. 24). A panel of 39 PDL1 mAbs and 33 PDL2 mAbs were identified and investigated for their binding affinity via Biacore, a surface plasmon resonance (SPR)-based technology. Experimental steps for Biacore generally included the following: Immobilization (capture of ligand onto a sensor chip); Association (flowing of various concentrations of analyte over sensor chip); and Dissociation (flowing buffer over the sensor chips) in order to determine the affinity of the test articles. Data depicted in FIGS. 27 and 33 show that there was a range of binding affinities. Sequences for illustrative PDL1 clones 13G1 and 13G7 are depicted in FIGS. 25-26; and sequences for illustrative PDL2 clones 5C11, 8G2, 8G5, and 16G11 are depicted in FIGS. 29-32. Although the mice were engineered with a common light chain, the mice were still capable of somatic hypermutation of the light chain, thus allowing the introduction of mutations in the light chains of many of these clones. Accordingly, the heavy chains were paired with the engineered germline light chain (hereon referred to as “6B1_L1”, sequences for which are depicted in FIG. 24). Additionally, further substitutions were made in the framework regions to revert non-germline amino acids back to germline when non-impact to antigen binding is expected. These sequences are also depicted alongside their parental sequences. To confirm that these novel binding domains were capable of PDL1 or PDL2 blockade, PDL1×CD28 bsAbs, PDL2×CD28 bsAbs, or PDL1×PDL2×CD28 triAbs based on these binding domains were incubated with CHO-PDL1 or CHO-PDL2 cells. After incubation with the bsAbs, the cells were incubated with AF647-labeled PD1. Data as depicted in FIGS. 128-129 show that the bsAbs based on these novel binding domains dose dependently blocked PD1 from binding cell surface PDL1 and PDL2.

[1514] To tune binding affinities for PDL1 and PDL2 (and potencies of the bispecific or trispecific molecules), an affinity ladder was engineered with the aim to achieve binding domains with K_{D} values ˜100 pM (0.1 nM) (which affinity range is optimal as determined by the modeling as will be described in Example 5D; illustrative sequences for which are depicted in FIGS. 26A-26D and SEQ ID NOs: 29-40 and 1764-1793 for affinity-engineered 13G7 and FIGS. 32A-32D and SEQ ID NOs: 77-88 and 2266-2295 for affinity-engineered 16G11; consensus sequences for FRs and CDRs of each clone and their affinity-engineered variants are depicted in FIGS. 26 and 32). While engineering was performed for 13G7 and 16G11 in the context of the H1 framework, the affinity-engineered CDRs may be grafted onto other parental frameworks. For example, CDRs of 13G7 H1.18 were grafted onto 13G7 H2 to generate 13G7 2.18. Similarly for example, CDRs of 16G11 H1.7 were grafted onto 16G11 H3 to generate 16G11 H3.7.

[1515] K_{D} of affinity-engineered 13G7 variants (formatted as bivalent IgG1 with PVA_/S267K variants) were determined via Carterra LSA Platform, another SPR-based technology. HC30M chip amine coupled with goat anti-human Fc antibody was used to capture the antibodies, and multiple concentrations of his-tagged was flowed over the antibodies. Data for which are depicted in FIGS. 145-146 show that 4 variants achieved K_{D} values ranging from 50 pM to 180 pM.

[1516] K_{D} of affinity-engineered 16G11 variants (formatted as bivalent IgG1 with PVA_/S267K variants) were determined via Carterra LSA Platform as described above, data for which are depicted in FIGS. 147-148. 5 variants achieved K_{D} values ranging from 110 pM to 180 pM.

[1517] 1B(b): Phage

[1518] As will be described further in Example X, additional common light chain PDL1 and PDL2 binding domains that could be utilized with αCD28 clone 1A7 was desired. Therefore, in a second campaign, a phage library utilizing a constant human germline VL (utilizing the same human germline VL as in Example 2A, except without any diversity) and diversity in the VH was used. The amino acid sequences for exemplary phage-derived αPDL1 clone 2A3A4.248 and αPDL2 clone 1F12A4.249 are depicted in FIGS. 161 and 162.

[1519] As above, to tune binding affinities for PDL1 and PDL2 (and potencies of the bispecific or trispecific molecules) with the aim to achieve binding domains with K_{D} values ˜100 pM (0.1 nM), an affinity ladder was engineered (illustrative sequences for which are depicted in FIGS. 161A-161C and SEQ ID NOs: 3235-3266 for affinity-engineered 2A3A4.248 and FIGS. 162A-162G and SEQ ID NOs: 3267-3353 for affinity-engineered 1F12A4.249; consensus sequences for FRs and CDRs of each clone and their affinity-engineered variants are depicted in FIGS. 161 and 162).

[1520] K_{D} of affinity-engineered 2A3A4.248 variants (formatted as bivalent IgG1 with PVA_/S267K variants) were determined via Carterra LSA platform as described above, data for which are depicted in FIGS. 149-150. 4 variants achieved K_{D} values ranging from 83 pM to 180 pM.

[1521] K_{D} of affinity-engineered 1F12A4.249 variants (formatted as bivalent IgG1 with PVA_/S267K variants) were determined via Carterra LSA platform as described above, data for which are depicted in FIGS. 151-152 (round 1) and 153-154 (round 2). In the first round, no variants showed K_{D} in the desired range, with best clone having a K_{D} of 480 pM. In the second round, 3 variants achieved K_{D} values less than 100 pM. It should be noted that these PDL1 and PDL2 binding domains may be used in the context of CLC format PDL1×PDL2×CD28 triAbs, as well as in the context of PDL1×CD28 and PDL2×CD28 bsAbs.

[1522] 1C: Additional PDL1 and PDL2 Binding Domains

[1523] Sequences for additional PDL1 and PDL2 binding domains which may find use in the PDL1×CD28 and PDL1×CD28 bsAbs and PDL2/L2×CD28 triAbs of the invention are depicted in FIGS. 28 and 34 as SEQ ID NOs: 1794-2265 and 2296-2447.

### Example 2: CD28 Binding Domains

[1524] Sequences for human, mouse, and cynomolgus CD28 are depicted in FIG. 3 and are useful for the development of cross-reactive CD28 antigen binding domains for ease of clinical development.

[1525] 2A: CD28 Binding Domain 1A7

[1526] An approach considered to avoid the superagonism associated with TGN1412 was to generate novel CD28 binding domains having lower affinity binding to CD28 and/or binding to a different CD28 epitope than TGN1412. In one campaign to generate such novel CD28 binding domains, in-house de novo phage libraries were panned against CD28 which culminated in a phage-derived clone 1A7 which was determined to not be superagonistic (sequences depicted in FIG. 32). To enable tuning of CD28 bsAbs (e.g. to optimize potency and therapeutic index), numerous 1A7 affinity variants were developed by engineering VH variants (illustrative sequences as depicted in FIG. 35 and additional sequences depicted as SEQ ID NOs: 2448-2455), VL variants (illustrative sequences as depicted in FIG. 36 and additional sequences depicted as SEQ ID NOs: 2456-2524), and combinations thereof (illustrative sequences for which are depicted in FIG. 37). Consensus sequence of the variants are depicted in FIG. 39. Affinity of illustrative variants, in the context of PDL1×CD28 bsAbs having sequences as depicted in FIG. 38, was determined using Octet as generally described below, binding affinity as depicted in FIG. 40. Potential superagonism of clone 1A& was assessed by air-drying per the Stebbings protocol (Stebbings R. et al. 2007). Air-drying of test articles was achieved by drying in a SpeedVac™ for 2 hours at room temperature. Human PBMCs were treated for 24 hours with 10 pg of air-dried parental αCD28 mAb 1A7), and activity was compared to the superagonist TGN1412 or PBS control. Air-dried TGN1412 promoted IFNγ secretion from unstimulated human PBMC. In comparison, IFNγ level in PBMCs treated with air-dried αCD28 mAb 1A7 remained similar to the negative control of PBS (data shown in FIG. 135).

[1527] 2B: Novel Common Light Chain CD28 Binding Domain

[1528] As described above, certain common light chain formats explored to develop PDL1×PDL2×CD28 triAbs utilized PDL1, PDL2, and CD28 binding domains having the same light chain.

[1529] 2B(a): Single Cell Technology in Genetically Engineered Mice

[1530] Towards this, additional novel CD28 binding domains were generated using single cell technology in the above-described mouse genetically engineered with complete human heavy chain variable domain combined with a human common light chain substitution in situ, sequences for which are depicted in FIGS. 41-74. Antibody secreting plasma cells were isolated and enriched from lymph nodes harvested from immunized mice. Bulk plasma cells were imported onto a microfluidic chip and single cells were sequestered into individual wells for screening. Each plasma cell was individually screened for secretion of antigen-specific IgG that is detected using an antigen coated bead-based fluorescence assay. Individual cells of interest were lysed, their mRNA captured and used to generate cDNA encoding antibody VH an VL sequences. As above although the mice were engineered with a common light chain, the mice were still capable of somatic hypermutation of the light chain, thus allowing the introduction of mutations in the light chains of these clones. Accordingly, the heavy chains were paired with the expected common light chain (i.e. 6B1_L1). Binding to human CD28 antigen by the WT parental binding domains sequenced from the single plasma cells and binding domains pairing the VH with the 6B1_L1 VL (in the context of bivalent mAbs) was investigated using Octet, a BioLayer Interferometry (BLI)-based method. Experimental steps for Octet generally included the following: Immobilization (capture of ligand to a biosensor); Association (dipping of ligand-coated biosensors into wells containing serial dilutions of the analyte); and Dissociation (returning of biosensors to well containing buffer) in order to determine the affinity of the test articles. Resulting maximum binding responses are depicted in FIGS. 75-76 and show that that VH from most of the plasma cell-derived binding domains retain CD28 binding when paired with 6B1_L1 VL; however, VH from several of the clones (e.g. 1B1-4.88488, 2G5.88497 and 1D10-4.83967) demonstrated diminished CD28 binding response.

[1531] The novel CD28 binding domains were further investigated for binding to CD28⁺ Jurkat cells. CD28 mAbs were titrated on Jurkat cells with the top concentration of 30 μg/mL and binding was determined using AF647-labeled anti-Fc mAb, data for which are depicted in FIGS. 77-78. Next, agnostic properties of the novel CD28 binding domains were investigated. Purified T cells were added in the presence of plate bound CD28 mAbs (based on single-cell technology derived binding domains) and CD3 antibody OKT3 (100 ng/mL). One day after T cell seeding, TL-2 release was measured using MSD assay, data for which are shown in FIGS. 79-80. Notably, binding did not necessarily correlate to activity. XENP41858, XENP42419, XENP42422, XENP41869, XENP42421, and XENP41901 were weak binders but decent agonists. XENP41909, XENP41877, XENP41880, and XENP41936 were decent binders but did not show agonism.

[1532] 2B(b): Enabling 1A7 to Utilize a Common Light Chain

[1533] As will be described in Example 7G, the 1A7 binding domain enabled stronger potency than the 1A3.88474 binding domain. Accordingly, there was a desire to utilize the 1A7 binding domain in common light chain formats. As described in Example 1B(b), the phage library for discovering CD28 clone 1A7, PDL1 clone 2A3A4.24, and PDL2 clone 1F12A4.249 binding domains utilized the same human germline VL, although the CD28 library included diversity in the LCDR3. Surprisingly, it was found that the variable light domain of clone 1A7 differed from the parental germline VL by only a single amino acid in the LCDR3; however, despite there being only a single amino acid difference, the VH of 1A7 does not pair well with the parental germline VL resulting in diminished binding. Accordingly, affinity-optimization library was generated with focus on substitutions only in the variable heavy domain of 1A7 (to ensure that ability of the germline VL to act as common light chain with the PDL1 and PDL2 binding domains from Example 1B(b)) was not perturbed. Amino acid sequences for exemplary affinity-optimized 1A7 variable domains are depicted in FIGS. 163A-163C and SEQ ID NOs: 3354-3393 and 2674-2676.

[1534] Monovalent K_{D} of affinity-engineered 1A7 Fab variants (in the context of PDL1×PDL2×CD28 triAbs in the 1+1+1 stackFab₂-Fab-Fc format) were determined via Octet as generally described above. In particular, his-tagged CD28 antigen was captured onto HIS1k sensors and dipped into the triAbs to determine affinity, data for which are depicted in FIG. 159.

[1535] After engineering this additional 1A7 VH variants, favorite variants were paired with the original 1A7_L1 and L1.71 VLs to generate further affinity variants (in the context of scFvs). KD of these additional variants are depicted in FIG. 165. Finally, to stabilize formats comprising scFvs, disulfide-stabilized scFvs may be used. Disulfide-stabilized scFvs may be achieved by including cysteine substitutions in the VH and VL so that a disulfide bond is formed between the two cysteines (see FIG. 166 demonstrating improved thermostability by incorporating disulfide stabilization). Illustrative such disulfide-stabilized scFvs are depicted in FIG. 164, and KD are depicted in FIG. 165.

[1536] 2C: Additional CD28 Binding Domains

[1537] Sequences for additional CD28 binding domains which may find use in the PDL1×CD28 bsAbs of the invention are depicted in FIG. 81 and as SEQ ID NOs: 2799-2824 and 3468-3473.

### Example 3: Engineering PDL1×CD28 and PDL2×CD28 bsAbs

[1538] As described in Example 4, in classic T cell/APC interaction, there is a first signal provided by TCR reactivity with peptide-MHC (Signal 1) and a second signal provided by CD28 crosslinking by CD80/CD86 being expressed on APCs (Signal 2) which together fully activate T cells (see FIG. 92). Further, it may be useful to stack the CD28 signal with checkpoint blockade to mitigate any checkpoint mediated repression of the added CD28 signal (FIG. 93). PDL1×CD28 may provide the Signal 2 while advantageously further enabling blockade of PDL1:PD1 interaction (FIG. 94). Similarly, PDL2×CD28 may provide the Signal 2 while advantageously further enabling blockade of PDL2:PD1 interaction.

[1539] Accordingly, PDL1×CD28 and PDL2×CD28 bsAbs were engineered and produced. A number of formats were conceived, illustrative formats for which are outlined below and in FIG. 82.

[1540] 3A: 1+1 Fab-scFv-Fc Format

[1541] An illustrative bivalent, bispecific format is the 1+1 Fab-scFv-Fc format (depicted schematically in FIG. 82A) which comprises: a first monomer that is a heavy chain comprising, from N-terminal to C-terminal VH1-CH1-hinge-CH2-CH3 wherein CH2-CH3 is a first heterodimeric Fc domain; a second monomer comprising, from N-terminal to C-terminal scFv-linker-CH2-CH3 wherein CH2-CH3 is a second heterodimeric Fc domain complementary to the first heterodimeric Fc domain and wherein the scFv has a first antigen binding specificity; and a third monomer that is a light chain comprising, from N-terminal to C-terminal VL-CL wherein the VL pairs with VH1 to form an antigen binding domain having a second antigen specificity. Sequences for illustrative PDL1×CD28 and PDL2×CD28 bsAbs (based on binding domains as described in Examples 1 and 2) in the 1+1 Fab-scFv-Fc format are respectively depicted in FIGS. 84 and 87.

[1542] 3B: 2+1 Fab2-scFv-Fc Format

[1543] An illustrative trivalent, bispecific format is the 2+1 Fab2-scFv-Fc format (depicted schematically in FIG. 82B) which comprises: a first monomer that is a heavy chain comprising, from N-terminal to C-terminal VH1-CH1-hinge-CH2-CH3 wherein CH2-CH3 is a first heterodimeric Fc domain; a second monomer comprising, from N-terminal to C-terminal VH1-CH1-linker-scFv-linker-CH2-CH3 wherein CH2-CH3 is a second heterodimeric Fc domain complementary to the first heterodimeric Fc domain and wherein the scFv has a first antigen binding specificity; and a third monomer that is a light chain comprising, from N-terminal to C-terminal VL-CL wherein the VL pairs with the VH1 (in the first and second monomers) to form antigen binding domains having a second antigen binding specificity. Sequences for illustrative PDL1×CD28 bsAbs (based on binding domains as described in Examples 1 and 2) in the 2+1 Fab2-scFv-Fc format are depicted in FIG. 85.

[1544] 3C: 2+1 MAB-SCFV Format

[1545] Another illustrative trivalent, bispecific format is the 2+1 mAb-scFv format (depicted schematically in FIG. 82E) which comprises: a first monomer that is a heavy chain comprising, from N-terminal to C-terminal VH1-CH1-hinge-CH2-CH3 wherein CH2-CH3 is a first heterodimeric Fc domain; a second monomer comprising, from N-terminal to C-terminal VH1-CH1-hinge-CH2-CH3-linker-scFv wherein CH2-CH3 is a second heterodimeric Fc domain complementary to the first heterodimeric Fc domain and wherein the scFv has a first antigen specificity; and a third monomer that is a common light chain comprising, from N-terminal to-C-terminal VL-CL wherein the VL pairs with VH1 to form an antigen binding domains having a second antigen specificity. Sequences for illustrative PDL1×CD28 bsAbs (based on binding domains as described here) in the 2+1 mAb-scFv format are depicted in FIG. 86.

[1546] Any number of heterodimerization approaches as is known in the art could find use in these (and other) bispecific formats, in combination with any number of approaches for purifying heterodimers from contaminating homodimers, including those depicted in FIGS. 4-5. For example, some of the sequences depicted herein include H435R/Y436F on one monomer to facilitate purification; however, the antibodies may instead utilize alternative variants to facilitate purification. Regardless of bsAb format, the CD28 bispecific antibodies are monovalent for CD28 and incorporate Fc variants engineered to ablate FcγR binding to avoid potential superagonism. Such Fc variants include those depicted in FIG. 6. Any of the number of linkers as is known in the art may find use in linking the various domains of the bispecific antibody including for example the VH and VL domains of the scFv. Finally, it may be useful to maximize serum half-life of the bsAbs, and any of the number of half-life extending variants as is known in the art may find use in these bsAbs.

### Example 4: Engineering PDL1×PDL2×CD28 triAbs

[1547] Although as will be described in Example 5, PDL1×CD28 bsAbs and PDL2×CD28 bsAbs are active, they may be less efficacious on tumors having low PDL1 or PDL2 expression levels. Accordingly, it was hypothesized that engineering binding to both PDL1 and PDL2 may enable binding to a wider breadth of tumor cells (e.g. PDL1^{high}PDL2^{low} or PDL1^{low} PDL2^{high}). It is expected that co-expression of PDL1 and PDL2 are not required for activity and CD28 agonism should be achieved when only one antigen is expressed.

[1548] Accordingly, PDL1×PDL2×CD28 triAbs were conceived, engineered and produced. A number of formats were conceived, illustrative formats for which are outlined below and in FIG. 83.

[1549] 4A: 1+1+1 stackFab₂-scFv-Fc Format

[1550] An illustrative trivalent, trispecific format is the 1+1+1 stackFab2-scFv format (depicted schematically in FIG. 83A) which comprises: a first monomer comprising, from N-terminal to C-terminal VH1-CH1-linker-VH2-CH1-hinge-CH2-CH3 wherein CH2-CH3 is a first heterodimeric Fc domain; a second monomer comprising, from N-terminal to C-terminal scFv-linker-CH2-CH3 wherein CH2-CH3 is a second heterodimeric Fc domain complementary to the first heterodimeric Fc domain and wherein the scFv has a first antigen specificity; and a third monomer that is a common light chain comprising, from N-terminal to C-terminal VL-CL wherein the VL pairs with VH1 to form an antigen binding domain having a second antigen specificity and with VH2 to form an antigen binding domain having a third antigen specificity. Sequences for illustrative PDL1×PDL2×CD28 triAbs (based on binding domains as described in Examples 1 and 2) in the 1+1+1 stackFab2-scFv-Fc format are depicted in FIG. 88.

[1551] 4B: 1+1+1 Fab-(Fab-scFv)-Fc Format

[1552] Another trivalent, trispecific format is the 1+1+1 Fab-(Fab-scFv)-Fc format (depicted schematically in FIG. 83B) which comprises: a first monomer that is a heavy chain comprising, from N-terminal to C-terminal VH1-CH1-hinge-CH2-CH3 wherein CH2-CH3 is a first heterodimeric Fc domain; a second monomer comprising, from N-terminal to C-terminal VH2-CH1-linker-scFv-linker-CH2-CH3 wherein CH2-CH3 is a second heterodimeric Fc domain complementary to the first heterodimeric Fc domain and wherein the scFv has a first antigen specificity; and a third monomer that is a common light chain comprising, from N-terminal to C-terminal VL-CL wherein the VL pairs with VH1 to form an antigen binding domain having a second antigen specificity and with VH2 to form an antigen binding domain having a third antigen specificity. Sequences for illustrative PDL1×PDL2×CD28 triAbs (based on binding domains as described in Examples 1 and 2) in the 1+1+1 Fab-(Fab-scFv)-Fc format are depicted in FIG. 89.

[1553] 4C: 1+1+1 mAb-scFv

[1554] Another trivalent, trispecific format is the 1+1+1 mAb-scFv format (depicted schematically in FIG. 83C) which comprises: a first monomer that is a heavy chain comprising, from N-terminal to C-terminal VH1-CH1-hinge-CH2-CH3 wherein CH2-CH3 is a first heterodimeric Fc domain; a second monomer comprising, from N-terminal to C-terminal VH2-CH1-hinge-CH2-CH3-linker-scFv wherein CH2-CH3 is a second heterodimeric Fc domain complementary to the first heterodimeric Fc domain and wherein the scFv has a first antigen specificity; and a third monomer that is a common light chain comprising, from N-terminal to C-terminal VL-CL wherein the VL pairs with VH1 to form an antigen binding domain having a second antigen specificity and with VH2 to form an antigen binding domain having a third antigen specificity. Sequences for illustrative PDL1×PDL2×CD28 triAbs (based on binding domains as described in Examples 1 and 2) in the 1+1+1 mAb-scFv format are depicted in FIG. 90.

[1555] 4D: 1+1+1 stackFab2-Fab-Fc Format

[1556] A further trivalent, trispecific format is the 1+1+1 stackFab2-Fab-Fc format (depicted schematically in FIG. 83D) which comprises: a first monomer that is a heavy chain comprising, from N-terminal to C-terminal VH1-CH1-hinge-CH2-CH3 wherein CH2-CH3 is a first heterodimeric Fc domain; a second monomer comprising, from N-terminal to C-terminal VH2-CH1-linker-VH3-CH1-hinge-CH2-CH3 wherein CH2-CH3 is a second heterodimeric Fc domain complementary to the first heterodimeric Fc domain; and a third monomer that is a common light chain comprising, from N-terminal to C-terminal VL-CL wherein the VL pairs with VH1 to form an antigen binding domain having a first antigen specificity, with VH2 to form an antigen binding domain having a second antigen specificity, and with VH3 to form an antigen binding domain having a third antigen specificity. Sequences for illustrative PDL1×PDL2×CD28 triAbs (based on binding domains as described in Examples 1 and 2) in the 1+1+1 Fab2-Fab-Fc format are depicted in FIG. 91.

[1557] Any number of heterodimerization approaches as is known in the art could find use in these (and other) trispecific formats, in combination with any number of approaches for purifying heterodimers from contaminating homodimers, including those depicted in FIGS. 4-5. For example, some of the sequences depicted herein include H435R/Y436F on one monomer to facilitate purification; however, the antibodies may instead utilize alternative variants to facilitate purification. As with the bsAbs, regardless of triAb format, the CD28 trispecific antibodies are monovalent for CD28 and incorporate Fc variants engineered to ablate FcγR binding to avoid potential superagonism. Such Fc variants include those depicted in FIG. 6. Any of the number of linkers as is known in the art may find use in linking the various domains of the trispecific antibody including for example the VH and VL domains of the scFv. Finally, it may be useful to maximize serum half-life of the triAbs, and any of the number of half-life extending variants as is known in the art may find use in these triAbs.

### Example 5: PDL1×CD28 bsAbs

[1558] 5A: Initial Characterization of PDL1×CD28 bsAbs

[1559] 5A(a): PDL1×CD28 bsAbs Induce Expansion of T Cells

[1560] MDA-MB-231 (PDL1+) cancer cells were ectopically loaded with pp65-derived NLV-peptide for 24 hours. The following day, T cells from a CMV+ donor were added along with a monovalent PDL1 antibody XENP24118 (based on avelumab; sequences depicted in FIG. 95) or PDL1×CD28 XENP34963. Expansion of CMV+ T cells was measured with an NLV-specific tetramer. The data as depicted in FIG. 96 show that the PDL1×CD28 bsAb XENP36233 significantly enhanced T cell expansion in comparison to PDL1 blockade alone.

[1561] 5A(b): PDL1×CD28 bsAbs Block PD-1:PD-L1 Interaction During T-Cell:Cancer Cell Interactions

[1562] Jurkat-PD1 cells were treated with a dose titration of the indicated test articles (i.e. PDL1×CD28 bsAbs containing PDL1 clone 2G4, a partial-blocking PDL1 arm, or a non-blocking PDL1 arm) in the presence of CHO-PDL1-CD80-αCD3 and CHO-PDL1-αCD3 cells. 6 hours post Jurkat-PD1 seeding, luciferase activity was measured as an indicator of PD-1 blockade. The data as depicted in FIG. 101 show that XENP36233 having blocking PDL1 clone 2G4 induced strong luciferase activity in comparison to PDL1×CD28 bsAbs having partial blocking or non-blocking PDL1 arms.

[1563] 5A(c): PDL1×CD28 bsAbs are More Active on Cells Having Higher PDL1 Antigen Density

[1564] PDL1^{null} MC38 cells were transfected to express low or medium levels of PDL1 antigen (respectively 40K and 59K antigen density). Parental, PDL1^{low}, and PDL1^{med} MC38 clones were treated with a dose titration of XENP36233. Secondary A647-conjugated anti-human Fc antibody was used to detect the bsAbs by flow cytometry, data for which are depicted in FIG. 102.

[1565] Next, PDL1^{null} HEK293T cells were transfected to express medium or high levels of PDL1 antigen. 10,000 CD3+ T cells were treated with a dose titration of XENP36233 and 1 μg/mL B7H3×CD3 in the presence of 10,000 PDL1-HEK293T density series. 1 day post T cell seeding, IL-2 secretion was measured using MSD assay, data as depicted in FIG. 103. Collectively, the data show that PDL1×CD28 bsAbs are more active on cells having higher PDL1 antigen density.

[1566] 5A(d): PDL1×CD28 bsAbs Enhance Activity of CD3 Bispecific Antibodies, but Only on PDL1⁺ Cell Lines

[1567] In a first experiment, induction of cytokine (IL-2 and IFNγ) release and CD3⁺ T cell expansion by PDL1×CD28 bsAbs in combination with CD3 bispecific antibodies was assessed using Incucyte® Live-Cell Analysis system (Essen BioScience, Ann Arbor, MI). MDA-MB-231 cancer cells and T cells were mixed with 1 μg/ml of an illustrative B7H3×CD3 bispecific and indicated concentrations of PDL1 mAb XENP24118 or PDL1×CD28 bsAb XENP34963. Cancer cell growth was assayed over time with Incucyte, while cytokine secretion was measured using MSD assay (Meso Scale Discovery, Rockville, Md.) and T cell expansion was measured using flow cytometry. The data as depicted in FIG. 97 show that PDL1×CD28 bsAb synergizes with CD3 bispecific antibodies to induce T-cell activation.

[1568] In another experiment, cell kill at a 1:1 effector:target ratio was assessed using xCELLigence Real Time Cell Analysis instrument (ACEA Biosciences, San Diego, CA). 1,250 LNCaP cancer cells were first seeded. After 48 hours, freshly enriched CD3+ T cells at an effector:target of 1:1 were added along with antibodies (PSMA×CD3 XENP32220 alone or XENP32220 in combination with XENP36233; sequences for XENP32220 are depicted in FIG. 16) at a constant dose. Cell kill was recorded for 10 days post T cell seeding. In this experiment, the data as depicted in FIG. 98 show that XENP32220 alone was able to enhance cell kill in comparison to incubation of cancer and T cells alone; however, addition of PDL1×CD28 overcomes cancer cell resistance to the CD3 bispecific and further enhances cell kill.

[1569] However, CD3 bsAb activity is only enhanced on PDL1+ cells. CD3+ T cells were incubated with 22Rv1 (PDL1^{null}) at 10:1 and 1:1 E:T ratios with illustrative B7H3×CD3 alone or B7H3×CD3 in combination with XENP36233. Cell kill was recorded using xCELLigence for 7 days post T cell seeding. The data as depicted in FIG. 104 show that αPDL1×αCD28 bsAb XENP36233 did not synergize with the αB7H3×αCD3 to enhance cell kill of the PDL1 negative 22Rv1 cell line.

[1570] 5A(e): PDL1×CD28 Synergizes with CD3 bsAb Over Time as PDL1 Expression Increases

[1571] PC3 cells were cocultured with T cells and then treated with illustrative B7H3×CD3 bsAb alone or with αIFNγ neutralizing mAb. PDL1 expression on PC3 cells was assessed by flow cytometry as depicted in FIG. 132. The data indicate that CD3 bsAbs induce PDL1 and PDL2 expression by promoting IFNγ release.

[1572] Next, PC3 cells were cocultured with T cells and then treated with indicated antibodies for 1 day, 2 days, or 5 days. IFNγ was measured in culture supernatants at indicated times after antibody treatment, data for which are depicted in FIG. 133 showing that CD3 bsAb synergizes with PDL1×CD28 over time as PDL1 expression increases.

[1573] 5A(f): PDL1×CD28 Enhances Anti-Tumor Activity In Vivo

[1574] MC38 cancer cells stably expressing human PDL1 antigen were subcutaneously inoculated into human CD28 knock-in mice. When tumors were palpable (Day 0), mice were intraperitoneally treated weekly with either 5 mg/kg bivalent PDL1 antibody based on avelumab (XENP24118), 6 mg/kg PDL1×CD28 XENP34961 (2+1 mAb-scFv format), or 8.3 mg/kg PDL1×CD28 XENP34963 (1+1 Fab-scFv-Fc format). Mice were additionally dosed on Days 3, 7, 10, 14, and 17. Tumor volumes were monitored by caliper measurements, data for which are shown (days post 1^{st} dose) in FIG. 99. The data show that although PDL1 blockade inhibited tumor growth, the PDL1×CD28 bsAbs as a single-agents significantly enhanced anti-tumor activity.

[1575] 5A(g): PDL1×CD28 was Well Tolerated in Cynomolgus Monkeys and Exhibited Favorable Pharmacokinetics

[1576] Cynomolgus monkeys were dosed with XENP36764 (sequences for which are depicted in FIG. 84; XENP36233 further engineered with M428L/N434S for enhanced half-life). The data as depicted in FIG. 105 show that the PDL1×CD28 exhibited favorable pharmacokinetics. Additionally, the bsAb was well tolerated (data not shown).

[1577] 5B: Optimizing PDL1×CD28 bsAbs

[1578] 5B(a): Mechanism-Based PK/PD Modeling Suggests Avenues for Tuning CD28 and PDL1 Binding Affinities

[1579] Surface expression of PD-L1 is low on tumors may limit synapse engagement and presents the problem of how to obtain optimal cross-linking of CD28 with a bispecific. With this background, computer modeling was used to assist engineering of optimized PDL1×CD28 bsAbs by finding the best balance of CD28 and PDL1 affinities to achieve low antigen density targeting. A mechanism-based model was developed using experimental data (from scientific literature and in-house generated) and the following assumptions (schematically depicted in FIG. 106): three well-mixed compartments (central, peripheral, and tumor); all the compartments contain both T cells and PDL1 expressing cells; free drug transport between all compartments; non-specific clearance of the drug occurs in all compartments with the same order rate; soluble target for CD28 and PDL1 are low affinity and therefore not included; drug-bound receptor has the same internalization rate as the free receptor; cross-linking CD28:drug_PD-L1 trimer is assumed to internalize with either target; and cross-linking CD28:drug_PD-L1 trimer is assumed to internalize at the rate of faster receptor. As depicted in FIG. 107, the model predicted intratumoral T cell costimulatory activity and consistent PDL1 blockade; linear PK at dose levels consistent with typical checkpoint inhibitor regimens; trimer formation in the tumor indicating costimulation; and consistent blockade of PDL1.

[1580] Notably in view of low surface expression of PDL1 on tumors, the simulations suggested that CD28 affinity must be enhanced (from 560 nM to 58 nM) and that PDL1 affinity must be enhanced (from 2.4 nM to 0.1 nM).

[1581] 5B(b): Tuning CD28 Binding Affinity

[1582] Based on the above suggestion, CD28 clone 1A7 affinity variants were engineered as described in Example 1A(c) and paired with WT PDL1 clone 2G4.

[1583] 5B(b)i: Increasing CD28 Affinity Leads to More Potent and Efficacious TL-2 Secretion

[1584] In a first experiment investigating the effect of enhanced CD28 binding affinity, MDA-MB-231 or DU145 cancer were incubated with CD3+ T cells at an E:T ratio of 10:1, 1 μg/mL B7H3×CD3, and titrated doses of the indicated PDL1×CD28 test articles having the following range of CD28 binding affinities: 37 nM (1A7_L1.71_H1.14 in XENP37561); 36 nM (1A7_H1.14_L1.71 in XENP37261); 96 nM (1A7_H1.1_L1.71 in XENP37560); 180 nM (1A7_H1_L1.71 in XENP37559); 286 nM (1A7_L1_H1.14 in XENP37412); and 240 nM (1A7_H1.14_L1 in XENP36233). IL-2 secretion was assessed after 24 hours, data for which are depicted in FIG. 108. The data show that increasing CD28 affinity leads to more potent and efficacious IL-2 secretion. Notably in this set, 180 nM binding affinity for CD28 is the minimum for maximum activity (with XENP37412 and XENP36233 respectively having 286 nM and 240 nM binding affinities for CD28 demonstrating not only less potent but also less efficacious activity).

[1585] 5B(b)ii: Increasing CD28 Affinity Increases Cytotoxicity of PDL1^{low} Cancer Cells at an E:T of 1:1

[1586] In a second experiment investigating the effect of enhanced CD28 binding affinity, LnCAP cells (PDL1^{low}) were incubated with CD3+ T cells at a low E:T ratio of 1:1 with 1 μg/ml αB7H3×αCD3 bsAb alone or in combination with 1 μg/ml of PDL1×CD28 bsAbs having different CD28 binding affinities (same set as in Example 5B(a)). Cytotoxicity was recorded using xCELLigence for 6 days post T cell seeding, data for which are depicted in FIG. 109. The data show that increasing CD28 affinity increases cytotoxicity of low PDL1 expressing cancer cells at a low E:T ratio of 1:1.

[1587] 5B(b)ii: Increasing CD28 Affinity Increases Cytotoxicity of PDL1^{med} Cancer Cells at an E:T of 0.1:1

[1588] In a second experiment investigating the effect of enhanced CD28 binding affinity, DU145 cells (PDL1^{med}) were incubated with CD3+ T cells at a low E:T ratio of 0.1:1 with 1 μg/ml αB7H3×αCD3 bsAb alone or in combination with 1 μg/ml of PDL1×CD28 bsAbs having different CD28 binding affinities (same set as in Example 5B(a)). Cytotoxicity was recorded using xCELLigence for 6 days post T cell seeding, data for which are depicted in FIG. 110. The data show that increasing CD28 affinity increases cytotoxicity of medium PDL1 expressing cancer cells at a very low E:T ratio of 0.1:1.

[1589] 5B(b)iii: PDL1×CD28 bsAbs Tuned for Enhanced CD28 Binding Affinity are Active In Vivo

[1590] PDL1×CD28 bsAb XENP37261 having affinity-enhanced CD28 arm was investigated in an in vivo anti-tumor model similar to Example 4F. MC38 cancer cells stably expressing human PDL1 antigen were subcutaneously inoculated into human CD28 knock-in mice. When tumors were palpable (Day 0), mice were intraperitoneally treated weekly with either 6.6 mg/kg monovalent PDL1 antibody based on avelumab (XENP36627) or 8.3 mg/kg PDL1×CD28 XENP37261. Tumor volumes were monitored by caliper measurements, data for which are shown (days post 1^{st} dose) in FIG. 111. The data show that although PDL1 blockade inhibited tumor growth, the PDL1×CD28 bsAb XENP37261 as a single-agent significantly enhanced anti-tumor activity.

[1591] 5B(c): Tuning PDL1 Binding Affinity

[1592] Next, PDL1 clone 2G4 affinity variants were engineered as described in Example 1A and paired with CD28 clone 1A7_H1_L1.71 (180 nM CD28 arm; lower CD28 activity allows for assessment of PDL1 blockade).

[1593] 5B(c)i: Increasing PDL1 Affinity Promotes Cytokine Secretion

[1594] In a first experiment, DU145-NLR cells were incubated with CD3+ T cells at a E:T ratio of 1:1 and treated with 1 μg/mL B7H3×CD3 and dose response of the indicated PDL1×CD28 bsAbs having different PDL1 binding affinities. 1 day post T cell seeding, IL-2 secretion was assessed using MSD assay, data for which are depicted in FIG. 112. The data show that increased PDL1 affinity promotes IL-2 secretion.

[1595] In a second experiment, data for which are depicted in FIG. 113, XENP38514 having 0.17 nM PDL1 arm enhances T cell/APC interaction in DC:T cell mixed lymphocyte reaction as indicated by IL-2 and IFNγ release.

[1596] 5B(c)ii: Increasing PDL1 Affinity Promotes PD1:PDL1 Blockade

[1597] In another experiment, indicated concentrations of the PDL1×CD28 bsAbs were incubated in the presence of huPD-L1-mFc fusion for 30 minutes at room temperature. The mixture was then combined with PD-1-expressing HEK293T cells and incubated for 1 hour at 4° C. Cells were stained with anti-mouse Fc and binding was assessed by flow cytometry, data for which are depicted in FIG. 114. The data show the PDL1×CD28 bsAbs can block interaction between PD1 and PDL1.

[1598] 5B(d): Tuning Both CD28 and PDL1 Binding Affinities

[1599] As the mechanism-based modeling suggested that affinity-enhanced CD28 binding domains should be paired with affinity-enhanced PDL1 binding domains, bsAbs having affinity-enhanced CD28 clone 1A7 variants were paired with affinity-enhanced PDL1 clone 2G4.

[1600] In a first experiment, PDL1 binding domains having 0.6 nM, 1 nM, and 2.6 nM binding affinities were paired with CD28 binding domains having 37 nM, 96 nM, 180 nM, and 230 nM binding affinities and investigated in an SEB-stimulated PBMC assay. PBMCs were stimulated with 110 ng/mL SEB for 2 days. 200,000 PBMCs were then seeded in the presence of 10 ng/mL SEB and PDL1×CD28 bsAbs at the indicated doses. IL-2 secretion was assayed after 24 hours, data for which are depicted in FIG. 115. The data suggest that high affinity PD-L1 arms such as 0.6 nM arm is optimally paired with 37 nM CD28 arm; nonetheless, high affinity PD-L1 binding overcomes the requirement for increased CD28 affinity as it also enables good activity in combination with low affinity CD28 as in XENP39365 and XENP39368.

[1601] 5C: Further Optimization of the PDL1×CD28 bsAbs

[1602] Additional optimization of other characteristics such as stability and expression are also important from a developability perspective. Although pairing high affinity PDL1 binding domain 2G4_H1.12_L1.24 with high affinity CD28 binding domain 1A7_H1.14_L1.71 as in XENP38512 enables a molecule having optimal biological activity, it turns out that XENP38512 suffered from less than ideal stability and antibody expression levels (data not shown). Accordingly, additional affinity variants were generated based on 2G4_H1.12_L1.24 by reverting or back mutating substitutions suspected to decrease stability and/or yield and/or to achieve a minimal necessary set of substitutions (relative to H1L1). Several binding domains including 2G4_H1.12_L1.14, 2G4_H1.12_L1.66, and 2G4_H1.12_L1.68 were identified which demonstrated 4.5° C. improved Tₘ in comparison to 2G4_H1.12_L1.24 as well as improved yield while maintaining high affinity PDL1 binding. Additionally, codon optimization was investigated.

[1603] In a further experiment, PDL1 binding domains 2G4_H1.12_L1.24 (0.17 nM), 2G4_H1.12_L1.66 (0.86 nM), 2G4_H1.12_L1.68 (0.80 nM), or 2G4_H1.12_L1.14 (0.42 nM) binding affinities were paired with CD28 binding domain having 37 nM binding affinity (1A7_H1.14_L1.71) and investigated in a reverse CAR-T experiment (wherein test articles were incubated with CD3+ enriched T cells, MDA-MB-231 transfected to express CD3 scFv (to act as Signal 1)), and 1 μg/mL of an illustrative B7H3×CD3 bsAb. It should be noted that XENP38512 and XENP40036 have the same amino acid but were expressed from different codons. The data as depicted in FIG. 116 show that the stability/production optimized variants enabled similar IL2 induction as compared to 2G4_H1.12_L1.24 albeit with XENP40409 (non-Xtend analog of XENP40706, containing 2G4_H1.12_L1.14) inducing IL2 production most potently.

[1604] 5D: PDL1×CD28 bsAbs Selectively Induce Proliferation of Effector T Cells in Cynomolgus Monkeys

[1605] Cynomolgus monkeys were dosed with XENP36803 (1× dose, 4× dose, and 10× dose) or XENP36764 (4× dose, 10× dose, and 20× dose) to investigate pharmacodynamics of the PDL1×CD28 bsAbs of the invention. Data from the study show that CD28 receptor occupancy is detected up to day 14 on T cells (FIG. 117) and PDL1 receptor occupancy is detected in activated monocytes (FIG. 118). Finally as depicted in FIG. 119, it was found that the PDL1×CD28 bsAbs demonstrate cytokine-like activity in selectively inducing proliferation of effector CD4+ and CD8+ T cells, particularly CD45RA− subsets. Notably, XENP36764 in the 1+1 Fab-scFv-Fc format having monovalent binding for PDL1 induced proliferation more efficaciously than XENP36803 in the 2+1 mAb-scFv format having bivalent binding for PDL1.

[1606] 5E: Characterizing PDL1×CD28 bsAbs Utilizing Additional PDL1 Binding Domains

[1607] Activity of the novel PDL1 binding domains from the common light chain single-cell campaign described in Example 2B were first investigated in the context of PDL1×CD28 bsAbs to confirm they are biologically active. Induction of cytokine (IL-2 and IFNγ) release was assessed as follows: MDA-MB-231 (PDL1+PDL2+) cancer cells and T cells (1:1 effector:target ratio) were mixed with 1 μg/ml of an illustrative B7H3×CD3 bispecific and indicated concentrations of PDL1×CD28 bsAbs. The data as shown in FIG. 120 show that XENP42047 and XENP42048 respectively utilizing 13G1 and 13G7 PDL1 CLC binding domains demonstrated similar potency and efficacy as XENP37261, while additional bsAbs utilizing other PDL1 CLC binding domains were less potent and/or efficacious.

### Example 6: PDL2×CD28 bsAbs

[1608] Activity of the novel PDL2 binding domains from the common light chain single-cell campaign described in Example 2B were first investigated in the context of PDL2×CD28 bsAbs. This is to confirm that the PDL2 domains are suitable for use in the PDL1×PDL2×CD28 triAbs of the invention but also demonstrates that PDL2×CD28 bsAbs can also be useful. Induction of cytokine (IL-2 and IFNγ) release was assessed as follows: MDA-MB-231 (PDL1+PDL2+) cancer cells and T cells (1:1 effector:target ratio) were mixed with 1 μg/ml of an illustrative B7H3×CD3 bispecific and indicated concentrations of PDL2×CD28 bsAbs. The data as depicted in FIG. 121 show that most of the PDL2×CD28 bsAbs (XENP42051, XENP42052, XENP42053, and XENP42054 respectively utilizing 5C11, 8G2, 8G5, and 16G11 PDL2 CLC binding domains) but not all (i.e. XENP42050 using another high affinity PDL2 CLC binding domain) were equally or more potent and/or efficacious than the PDL1×CD28 bsAbs in inducing cytokine release.

### Example 7: PDL1×PDL2×CD28 triAbs

[1609] As described in Example 5A(c), PDL1×CD28 bsAbs are more active on PDL1^{high} cells. In certain contexts (e.g. within certain tumor environments), there may be insufficient PDL1 on tumor cells which may attenuate the efficacy of PDL1×CD28 bsAbs. It was hypothesized that antibody binding capacity could be restored or enhanced by introducing a PDL2 binding domain to make PDL1×PDL2×CD28 triAbs in which the PDL1 and PDL2 arms work mutually exclusive of each other. FIG. 122 depicts a simplified depiction of the scenarios wherein tumor cells have different expression levels of PDL1 and PDL2 and relative binding capacities of a PDL1×CD28 bsAb, a combination of PDL1×CD28, and a PDL1×PDL2×CD28 triAb (in the 1+1+1 Fab-Fab-scFv format having PDL1 and PDL2 CLC binding domain and a CD28 scFv binding domain) and illustrates that the triAb targets PDL1⁻PDL2+, PDL1+PDL2⁻, and PDL1⁺PDL2⁺ tumors.

[1610] 7A: 1+1+1 PDL1×PDL2×CD28 triAbs are Functional and Activity is Format Dependent

[1611] PDL1×PDL2×CD28 triAbs utilizing 13G1 and 13G7 CLC PDL1 binding domains, 5C11, 8G2, 8G5, and 16G11 CLC PDL2 binding domains, and 1A7-derived CD28 binding domain were produced in the 1+1+1 stackFab-scFv-Fc and the 1+1+1 mAb-scFv formats. Induction of cytokine (IL-2 and IFNγ) release by the triAbs was assessed as follows: PDL1-transfected CHO or PDL2-transfected CHO cells and T cells (1:1 effector:target ratio) were mixed with 1 μg/ml of an illustrative B7H3×CD3 bispecific (having murine B7H3 specificity) and indicated concentrations of bsAbs and triAbs. Data from these experiments are depicted in FIGS. 123-124. The PDL1×CD28 bsAbs did not induce any cytokine secretion in the presence of CHO-PDL2, and the PDL2×CD28 bsAbs did not induce any cytokine secretion in the presence of CHO-PDL1. However, the PDL1×PDL2×CD28 triAbs induced cytokine secretion in the presence of both the CHO-PDL1 and CHO-PDL2 cells (as hypothesized, mutually exclusive of each other so that only one target antigen is required). 1+1+1 mAb-scFv format bsAbs were functional and performed similarly on both CHO-PDL1 and CHO-PDL2 cells. Notably in the presence of CHO-PDL1 cells, stackFab-scFv-Fc format triAbs having PDL1 binding domain on the bottom was more potent than those triAbs having PDL2 binding domain on the bottom (although having PDL1 binding domain on the top was at least on par with the mAb-scFv format); while in the presence of CHO-PDL2 cells, stackFab-scFv-Fc format triAbs having PDL2 binding domain on the bottom was more potent that those triAbs having PDL1 binding domain on the bottom (although having PDL2 binding domain on top was at least on part with the mAb-scFv format).

[1612] In another experiment, PDL1×PDL2×CD28 triabs in 1+1+1 Fab-(Fab-scFv)-Fc (with the CD28 scFv in the VHVL or VLVH orientations), 1+1+1 stackFab₂-scFv-Fc, and 1+1+1 mAb-scFv formats were compared. Effector cells and LnCAP (PDL1^{low}PDL2^{null}), DU145 (PDL1^{med}PDL2^{null}), or LCLC103H (PDL1^{hi}PDL2^{med}) tumor cells were incubated at 1:1 effector:target with 1 μg/mL illustrative B7H3×CD3 bsAb and dose titration of the various PDL1×PDL2×CD28 triAbs, and resulting IL-2 secretion is depicted in FIG. 155. The data show that the triAbs in the stackFab₂-scFv-Fc format outperformed those in the Fab-(Fab-scFv)-Fc and mAb-scFv formats (which performed similarly). Notably, reversing the orientation of the CD28 scFv as in XENP42973 decreased activity.

[1613] In yet another experiment, PDL1×PDL2×CD28 triAbs in the 1+1+1 stackFab₂-scFv-Fc format with either WT scFv or stapled scFv. Effector cells and DU145 tumor cells were incubated at 1:1 effector:target with 1 μg/mL illustrative B7H3×CD3 bsAb and dose titration of the PDL1×PDL2×CD28 triAbs, and resulting IL-2 secretion is depicted in FIG. 156. The data show that activity was not affected by disulfide-stabilization of the scFv.

[1614] 7B: 1+1+1 PDL1×PDL2×CD28 triAbs are Functional on Cells Having Various PDL1 and PDL2 Expression Densities

[1615] Next, the activity of PDL1×PDL2×CD28 triAbs (as well as PDL1×CD28 and PDL2×CD28 bsAbs) were investigated in the context of cancer cell lines endogenously expressing PDL1, PDL2, and B7H3. FIG. 125 depicts PDL1, PDL2, and B7H3 antigen densities on LCLC-103H, SNU-423, and NCI-H460 cell lines (as determined by FACS using fluorescently-labeled beads as advised by the QuickCal protocol (Bangs Laboratories, Inc., Fishers, IN). The data show that the three cell lines had varied PDL1:PDL2 ratios.

[1616] In an initial set of experiments, 10,000 LCLC-103H, SNU-423, or NCI-H460 cells were plated overnight, then treated with a dose titration of PDL1×CD28 or PDL2×CD28 bsAbs, constant 1 μg/mL dose of an illustrative murine B7H3×CD3 bsAb, and purified T cells (1:1 effector:target ratio). IL2 was measured 1 day post T cell seeding using MSD assay, data for which are depicted in FIG. 126. The data show that each of the bsAbs were active on LCLC-103H and SNU-423 with XPL1-13G1 as the most potent PDL1 binding domain and 8G2 as the most potent PDL2 binding domain. Consistent with the data in Example 6, the PDL2×CD28 bsAbs were less active on the PDL21^{low} NCI-H460 cells. Notably while most of the PDL2×CD28 bsAbs were weaker in activity on the LCLC-103H and SNU-423 cell lines, the PDL2×CD28 bsAb XENP45052 having XPL2-8G2 retains activity comparable to the PDL1×CD28 bsAbs.

[1617] Next, the triAbs were tested. As above, 10,000 LCLC-103H, SNU-423, or NCI-H460 cells were plated overnight, then treated with a dose titration of PDL1×CD28 or PDL2×CD28 bsAbs, constant 1 μg/mL dose of an illustrative murine B7H3×CD3 bsAb, and purified T cells (1:1 effector:target ratio). IL2 was measured 1 day post T cell seeding using MSD assay, data for which are depicted in FIG. 127.

[1618] In another experiment, the triAbs were tested on PDL1high MDA-MB-231 (˜130,000 PDL1 antigens) and PDL1low LNCaP (˜13,000 PDL1 antigens). T cells were co-cultured with (A & C) MDA-MB-231 (130,000 PDL1 antigens) or (B & D) LNCaP (13,000 PDL1 antigens) and treated with indicated concentrations of indicated antibodies (illustrative B7H3×CD3 bsAb alone or in combination with PDL1×PDL2×CD28 bsAbs XENP43461, XENP44283, or XENP44288, sequences for which are depicted in FIGS. 88 and 91). IL-2 activity was assayed 1 day following treatment. Redirected T cell cytotoxicity (RTCC) activity was measured by luminescence 5 days following treatment. Data as depicted in FIG. 136 show enhancement of IL-2 release on both high and low PDL1 density target cells. Data as depicted in FIG. 137A show enhancement of T cell-directed cytotoxicity at low effector to target ratios (1:50).

[1619] 7C: 1+1+1 PDL1×PDL2×CD28 triAbs are Functional with Presence of Either PDL1 or PDL2

[1620] 10,000 LCLC-103H (100,000 PDL1 surface antigens, 40,000 PDL2 surface antigens) were plated overnight and then pre-treated with either 5 μg/mL blocking bivalent PDL1 mAb, 5 μg/mL blocking bivalent PDL2 mAb, or PBS control. Cells were then treated with a dose titration of XENP42049 PDL1×CD28, XENP42054 PDL2×CD28, or XENP43461 PDL1×PDL2×CD28 triAb, constant 1 μg/mL does of an illustrative murine B7H3×CD28 bsAb, purified T cells (1:1 effector:target ratio). IL2 was measured 1 day post T cell seeding using MSD assay, data for which are depicted in FIG. 130. The data show that PDL1×CD28 bsAbs require PDL1 (as indicated by reduced potency of XENP42049 in the presence of PDL1 blockade) and PDL2×CD28 bsAbs require PDL2 (as indicated by reduced potency of XENP42054 in the presence of PDL2 blockade) while PDL1×PDL2×CD28 triAbs are active with presence of either PDL1 or PDL2 (as indicated by similar potency in the presence of either PDL1 or PDL2 blockade).

[1621] 7D: PDL1 and PDL2 Blockade by PDL1×PDL2 triAbs are Functionally Equivalent to PD1 Blockade

[1622] To investigate effect of PDL1 and PDL2 blockade by PDL1×PDL2×CD28 triAbs without influence of the CD28 binding domain, PDL1×PDL2×RSV triAb XENP43456 (sequences as depicted in FIG. 131) was engineered and produced. Mixed lymphocyte reactions (n−14) were treated with indicated concentration of PBS, XENP43456 PDL1×PDL2×RSV triAb, or anti-PD1 mAb and IFNγ secretion was assayed after 5 days. Data depicted in FIG. 134 show that PDL1 and PDL2 blockade by PDL1×PDL2 triAbs are functionally equivalent to PD1 blockade.

[1623] In another experiment, Jurkat-PD1 cells were treated with a dose titration of PD-1 mAb or XENP43456 PDL1×PDL2×RSV triAb (sequences depicted in FIG. 131) in the presence of A431 cells (transfected to express αCD3 scFv). 6 hours post Jurkat-PD1 seeding, luciferase activity was measured as an indicator of PD-1 blockade. The data as depicted in FIG. 141 show that PDL1 and PDL2 blockade alone (absent CD28 agonism) is functionally equivalent to PD1 blockade.

[1624] 7E: PDL1×PDL2×CD28 triAbs Enhance a T Cell Recall Response in a CD28- and HLA-Dependent Manner

[1625] A CMV recall assay derived with A431-02M-null cells (40,000 PDL1 antigen) stably expressing a fusion of HLA-A2, β2M and NLV-peptide, a peptide presented by CMV-infection (Carreno et. al., J Imm. 188:5839-5849, 2012). CD3+ enriched T cells from two unique CMV+ PBMC donors were mixed with indicated cell lines and antibodies (XENP43461 PDL2×PDL1×CD28 triAb, XENP43456 RSV×PDL2×PDL1 triAb control, and XENP39273 RSV×CD28 bsAb control; sequences depicted in FIGS. 88 and 131). IL-2 was measured in culture supernatants 24 h following treatment. Data as depicted in FIG. 138 show that PDL1×PDL2×CD28 triAbs enhance a T cell recall response in a CD28- and HLA-dependent manner.

[1626] 7F: PDL1×PDL2×CD28 triAbs Reduces Tumor Growth in Syngeneic Mice MC38 Tumor Model

[1627] 1×10⁶ MC38 cancer cells stably expressing high levels of human PDL1 antigen were subcutaneously inoculated into human PDL1/human CD28 double knock-in C57BL/6 mice. When tumors were at approximately 300 mm³ (Day 0), mice were intraperitoneally treated twice per week with either PBS control, bivalent anti-murine PD1 antibody (3 mg/kg), XENP43735 (mouse surrogate PDL1×PDL2×RSV triAb control, sequences as depicted in FIG. 139B; 10 mg/kg), or XENP43734 (mouse surrogate PDL1×PDL2×CD28 triAb analogous to XENP43461 (without Xtend), sequences as depicted in FIG. 139A; 10 mg/kg). Tumor volumes were monitored by caliper measurements twice per week, data for which are shown (days post 1^{st} dose) in FIG. 140. The data show that although PDL1/PDL2 blockade inhibited tumor growth, addition of the CD28 modality as in the PDL1×PDL2×CD28 triAb enhanced anti-tumor activity.

[1628] The data demonstrate that the PDL1×PDL2×CD28 trispecific antibody enhances the activity of a CD3 bispecific antibody through multiple mechanisms. Notably, the control antibody, PDL1×PDL2×RSV, demonstrates some improvement of anti-tumor activity by itself, consistent with the concept that blockade of the PD1 pathway can enhance the activity of a T cell engager. Moreover, when the CD28 binding arm is added in the PDL1×PDL2×CD28 trispecific antibody, additional antitumor activity and T cell expansion (data not shown) is observed, confirming that the targeted CD28 costimulation is also contributing to the potentiating effects of the molecule.

[1629] 7G: Developing PDL1×PDL2×CD28 triAbs Utilizing Common Light Chain for all Three Binding Domains

[1630] While the triAbs described above utilized common light chain for the PDL1 and PDL2 binding domains, it was desired to develop triAbs that utilized a common light chain for all three binding domains (full CLC triAbs) as multispecific antibodies utilizing Fab domains only may be less immunogenic and more stable than those utilizing scFv domains.

[1631] Initial efforts to develop such trispecific molecules built on the triAbs described above already utilizing common light chain for the PDL1 and PDL2 binding domains by panning for novel CD28 binding domains having the same common light chain. As described in Example 2B(a) and depicted in FIGS. 77-80, a number of suitable and functional CD28 binding domains were identified, amongst which clone 1A3.88474 demonstrated favorable properties. Accordingly, full common light chain triAbs were engineered using this binding domain including XENPs 43400, 43402, 43404, 43405, 43452, and 43453 (each of which utilized the same affinity-optimized PDL1 and PDL2 binding domains and CD28 binding domain, albeit with the binding domains in different positions). These triAbs were compared to XENP43461 (matching PDL1 and PDL2 binding domains in combination with 1A7 scFv in 1+1+1 stackFab₂-scFv-Fc format). The triAbs were incubated with 1 μg/ml illustrative B7H3×CD3 bsAb and DU145 tumor cells (1:1 effector:target), and IL-2 secretion was measured after 24 hours, data for which are depicted in FIG. 157. The data show that while all the triAbs were functional, XENP43461 having the 1A7 binding domain outperformed all triAbs having the 1A3 binding domain.

[1632] Next, development efforts focused on engineering a triAb utilizing a common light chain for all three binding domains and including the 1A7 VH. As described in Example 2B(b), the 1A7 clone comprises a variable light domain that differs by only a single amino acid in the LCDR3 from the variable light domain in an in-house common light chain phage library. Accordingly, novel common light chain PDL1 and PDL2 binding domains were identified and affinity-matured as described in Example 1B(b) to combine with 1A7. Additionally as described in Example 2B(b), the VH of 1A7 does not pair well with the parental germline VL used in the phage library, and so the VH of 1A7 was affinity-matured with the goal to engineered a triAb that performs as well as a triAb comprising the 1A7 37 nM scFv. Exemplary such full CLC triAbs comprising 1A7 with germline VL and affinity-matured VH include XENPs 44281-44289.

[1633] In a first experiment, the activity of these full CLC triAbs (as well as XENP43465 which is a 1+1+1 stackFab-scFv-Fc triAb comprising same affinity-optimized PDL1 and PDL2 binding domains and the 1A7 37 nM scFv) were investigated by incubating with 1 μg/ml illustrative B7H3×CD3 bsAb and DU145 cancer cells at 1:10 effector:target ratio, and IL-2 secretion after 24 hour is depicted in FIGS. 158-159. The data show that several of the full CLC triAbs achieved potency comparable to that of XENP43465.

[1634] In a second experiment, the activity of XENP4288, an exemplary full CLC triAb comprising 1A7-derived CD28 binding domain, and XENP43453, an exemplary full CLC triAb comprising 1A3 CD28 binding domain, were compared. Dose titration of illustrative B7H3×CD3 bsAb was incubated with 1 μg/ml PDL1×PDL2×CD28 triAbs in the presence of T cells and Caki-1 cancer cells (1:1 effector:target ratio), and IL-2 secretion after 24 hour is depicted in FIG. 160. The data show that the 1A7-based full CLC triAb is more potent and efficacious that the 1A3-based full CLC triAb. Additionally, data in FIG. 137B show enhancement of T cell-directed cytotoxicity on low antigen density target cells by XENP44283, another 1A7-based full CLC triAb.

[1635] 7H: PDL1×PDL2×CD28 triAbs Combines Productively with CD3 T Cell Engager to Reduce Tumor Growth in a Solid Tumor Xenograft Model

[1636] 3×10⁶ pp65-MDA-MB231gfp cancer cells were intradermally inoculated into NSG mice that were MHC I/II-DKO (NSG-DKO; resistant to GVHD) on Day −21. On Day 0, mice were engrafted with 5×10⁶ human PBMCs. Mice were intraperitoneally treated on Days 0, 7, 14, 19, and 28 with the following test articles: PBS control, illustrative B7H3×CD3 bsAb (0.5 mg/kg), PDL1×PDL2×CD28 XENP44676 (sequences as depicted in FIG. 91) in combination with B7H3×CD3 bsAb (respectively 5 mg/kg and 0.5 mg/kg), control PDL1×PDL2×RSV XENP44796 (sequences as depicted in FIG. 131) in combination with B7H3×CD3 bsAb (respectively 5 mg/kg and 0.5 mg/kg), or control RSV×RSV×CD28 XENP44797 (sequences as depicted in FIG. 131) in combination with B7H3×CD3 bsAb (respectively 5 mg/kg and 0.5 mg/kg). Tumor volumes were monitored by caliper measurements (1-3 times per week), data for which are shown (days post 1^{st} dose) in FIG. 142 (and Day 39 in FIG. 143). Blood was drawn weekly for cell counts, and data depicted CD3+ cells on Day 7 are shown in FIG. 144.

1-110. (canceled)

111. A multispecific antibody comprising:
a) a CD28 antigen binding domain comprising a first variable heavy domain (VH1) having at least 90% identity to the amino acid sequence of SEQ ID NO:3380 and a first variable light domain (VL1) having at least 90% identity to the amino acid sequence of SEQ ID NO:2452.
b) a PD-L2 antigen binding domain comprising a second variable heavy domain (VH2) having at least 90% identity to the amino acid sequence of SEQ ID NO:3319 and a second variable light domain (VL2) having at least 90% identity to the amino acid sequence of SEQ ID NO:2452; and
c) a PD-L1 antigen binding domain comprising a third variable heavy domain (VH3) having at least 90% identity to the amino acid sequence of SEQ ID NO:3251 and a third variable light domain (VL3) having at least 90% identity to the amino acid sequence of SEQ ID NO:2452.

112. The multispecific antibody according to claim 111 comprising:
a) a first monomer comprising, from N-terminal to C-terminal, VH1-CH1-hinge-CH2-CH3, wherein CH2-CH3 is a first Fc domain;
b) a second monomer comprising, from N-terminal to C-terminal, VH2-CH1-linker-VH3-CH1-hinge-CH2-CH3 and CH2-CH3 is a second Fc domain;
c) a first common light chain comprising from N-terminal to C-terminal, VL1-CL, wherein CL is a constant light domain;
d) a second common light chain comprising from N-terminal to C-terminal, VL2-CL, wherein is a constant light domain; and
c) a third common light chain comprising, from N-terminal to C-terminal, VL3-CL, wherein CL is a constant light domain;
wherein VH1 and VL1 form said CD28 antigen binding domain, VH2 and VL2 form said PDL-2 antigen binding domain, and VH3 and VL3 form said PD-L3 antigen binding.

113. The multispecific antibody according to claim 112, wherein the first and second Fc domains are variant Fc domains.

114. The multispecific antibody according to claim 113, wherein the first and second Fc domains comprise a set of heterodimerization skew variants selected from the group consisting of S364K/E357Q:L368D/K370S; S364K:L368D/K370S; S364K:L368E/K370S; D401K:T411E/K360E/Q362E; and T366W:T366S/L368A/Y407V, wherein numbering is according to EU numbering.

115. The multispecific antibody according to claim 114, wherein the first and second Fc domains each comprise one or more ablation variants.

116. The multispecific antibody according to claim 115, wherein the one or more ablation variants are E233P/L234V/L235A/G236del/S267K, wherein numbering is according to EU numbering.

117. The multispecific antibody according to claim 116 wherein the CH1-hinge-CH2-CH3 of the first monomer comprises pI variants N208D/Q295E/N384D/Q418E/N421D, wherein numbering is according to EU numbering.

118. The multispecific antibody according to claim 117, wherein the first Fc domain comprises amino acid variants L368D/K370S/N208D/Q295E/N384D/Q418E/N421D/E233P/L234V/L235A/G236del/S267K,
wherein the CH1-hinge-CH2-CH3 of the second monomer comprises amino acid variants S364K/E357Q/E233P/L234V/L235A/G236del/S267K, and wherein numbering is according to EU numbering.

119. The multispecific antibody according to claim 113, wherein the first and second Fc domains each further comprise amino acid variants 428/434S.

120. The multispecific antibody according to claim 112 wherein:
a) the PD-L1 binding domain comprises a variable heavy domain having the amino acid sequence of SEQ ID NO:3251, and a variable light domain having the amino acid sequence of SEQ ID NO:3239;
b) the PD-L2 binding domain comprises a variable heavy domain having the amino acid sequence of SEQ ID NO:3319, and a variable light domain having the amino acid sequence of SEQ ID NO:3239; and
c) the CD28 binding domain comprises a variable heavy domain having the amino acid sequence of SEQ ID NO:3380, and a variable light domain having the amino acid sequence of SEQ ID NO:3239.

121. The multispecific antibody according to claim 112, wherein:
a) the first monomer has the amino acid sequence of SEQ ID NO:3201;
b) the second monomer has the amino acid sequence of SEQ ID NO:3202; and
c) the first, second, and third common light chains each have the amino acid sequence of SEQ ID NO:3203.

122. A nucleic acid composition comprising:
a) a first polynucleotide encoding the first monomer of claim 112;
b) a second polynucleotide encoding the second monomer of claim 2; and
c) a third polynucleotide encoding the first, second, and third common light chains of claim 2.

123. An expression vector composition comprising:
a) a first expression vector comprising the first polynucleotide of claim 122,
b) a second expression vector comprising the second polynucleotide of claim 122, and
c) a third expression vector comprising the third polynucleotide of claim 122.

124. A host cell comprising the nucleic acid composition of claim 122, or the expression vector composition or claim 123.

125. A multispecific antibody according to claim 111 comprising:
a) a first monomer comprising, from N-terminal to C-terminal, scFv-linker-CH2-CH3 wherein CH2-CH3 is a first Fc domain;
b) a second monomer comprising, from N-terminal to C-terminal, VH1-CH1-linker-VH2-CH1-hinge-CH2-CH3 wherein VH1 is a first variable heavy domain, VH2 is a second variable heavy domain, and CH2-CH3 is a second Fc domain,
c) a first common light chain and a second common light chain that each comprise, from N-terminal to C-terminal, VL1-CL, wherein VL1 is a first variable light domain and CL is a constant light domain;
wherein the scFv comprises a third VH domain (VH3), a scFv linker, and a second variable light domain (VL2)
wherein the first variable heavy domain and the first variable light domain of the first common light chain form a first antigen binding domain, the second variable heavy domain and the first variable light domain of the second common light chain form a second antigen binding domain, and the third variable heavy domain and second variable light domain form a third antigen binding domain,
wherein one of the first, second, and third antigen binding domains is the PD-L1 antigen binding domain,
wherein one of the first, second, and third antigen binding domains is the PD-L2 antigen binding domain, and
wherein one of the first, second and third antigen binding domain is the CD28 binding domain.

126. A multispecific antibody according to claim 111 comprising:
a) a first monomer comprising, from N-terminal to C-terminal, VH1-CH1-linker-scFv-linker-CH2-CH3 wherein VH1 is a first variable heavy domain, and CH2-CH3 is a first Fc domain;
b) a second monomer comprising, from N-terminal to C-terminal, VH2-CH1-hinge-CH2-CH3 wherein VH2 is a second variable heavy domain, and CH2-CH3 is a second Fc domain,
c) a first common light chain and a second common light chain that each comprise, from N-terminal to C-terminal, VL1-CL, wherein VL1 is a first variable light domain and CL is a constant light domain;
wherein the scFv comprises a third VH domain (VH3), a scFv linker, and a second variable light domain (VL2)
wherein the first variable heavy domain and the first variable light domain of the first common light chain form a first antigen binding domain, the second variable heavy domain and the first variable light domain of the second common light chain form a second antigen binding domain, and the third variable heavy domain and second variable light domain form a third antigen binding domain,
wherein one of the first, second, and third antigen binding domains is the PD-L1 antigen binding domain,
wherein one of the first, second, and third antigen binding domains is the PD-L2 antigen binding domain, and
wherein one of the first, second and third antigen binding domain is the CD28 binding domain.

127. A multispecific antibody according to claim 111 comprising:
a) a first monomer comprising, from N-terminal to C-terminal, VH1-CH1-hinge-CH2-CH3-domain linker-scFv,
wherein VH1 is a first variable heavy domain, and CH2-CH3 is a first Fc domain;
b) a second monomer comprising, from N-terminal to C-terminal, a VH2-CH1-hinge-CH2-CH3, wherein VH2 is a second variable heavy domain and CH2-CH3 is a second Fc domain; and
c) a first common light chain and a second common light chain that each comprise, from N-terminal to C-terminal, VL1-CL, wherein VL1 is a first variable light domain and CL is a constant light domain;
wherein the scFv comprises a third VH domain (VH3), a scFv linker, and a second variable light domain (VL2)
wherein the first variable heavy domain and the first variable light domain of the first common light chain form a first antigen binding domain, the second variable heavy domain and the first variable light domain of the second common light chain form a second antigen binding domain, and the third variable heavy domain and second variable light domain form a third antigen binding domain,
wherein one of the first, second, and third antigen binding domains is the PD-L1 antigen binding domain,
wherein one of the first, second, and third antigen binding domains is the PD-L2 antigen binding domain, and
wherein one of the first, second and third antigen binding domain is the CD28 binding domain.

128. A composition comprising a CD28 antigen binding domain, wherein the CD28 binding domain comprises:
a) a variable heavy domain having at least 90% sequence identity to a variable heavy domain in FIG. 163; and
b) a variable light domain having at least 90% sequence identity to a variable light domain in FIGS. 35 and 37, or a variable light domain having the amino acid sequence of SEQ ID NO:3239.

129. A composition comprising a PD-L1 antigen binding domain, wherein the PD-L1 binding domain comprises:
a) a variable heavy domain having at least 90% sequence identity to a variable heavy domain in FIG. 161; and
b) a variable light domain having at least 90% sequence identity to a variable light domain having the amino acid sequence of SEQ ID NO:3239.

130. A composition comprising a PD-L2 antigen binding domain, wherein the PD-L1 binding domain comprises:
a) a variable heavy domain having at least 90% sequence identity to a variable heavy domain in FIG. 162; and
b) a variable light domain having at least 90% sequence identity to a variable light domain having the amino acid sequence of SEQ ID NO:3239.

The application's sequence listing, which the Patent Office published only in electronic form, follows.

SEQUENCE LISTING (3474 sequences)

SEQ ID NO: 1 - protein, 290 aa, Homo sapiens
  source 1..290: note = sp|Q9NZQ7
MRIFAVFIFMTYWHLLNAFTVTVPKDLYVVEYGSNMTIECKFPVEKQLDLAALIVYWEMEDKNIIQFVHGEEDLKVQHSSYRQRARLLKDQLSLGNAALQITDVKLQDAGVYRCMISYGGADYKRITVKVNAPYNKINQRILVVDPVTSEHELTCQAEGYPKAEVIWTSSDHQVLSGKTTTTNSKREEKLFNVTSTLRINTTTNEIFYCTFRRLDPEENHTAELVIPELPLAHPPNERTHLVILGAILLCLGVALTFIFRLRKGRMMDVKKCGIQDTNSKKQSDTHLEET

SEQ ID NO: 2 - protein, 220 aa, Homo sapiens
  source 1..220: note = sp|Q9NZQ7|19-238
FTVTVPKDLYVVEYGSNMTIECKFPVEKQLDLAALIVYWEMEDKNIIQFVHGEEDLKVQHSSYRQRARLLKDQLSLGNAALQITDVKLQDAGVYRCMISYGGADYKRITVKVNAPYNKINQRILVVDPVTSEHELTCQAEGYPKAEVIWTSSDHQVLSGKTTTTNSKREEKLFNVTSTLRINTTTNEIFYCTFRRLDPEENHTAELVIPELPLAHPPNER

SEQ ID NO: 3 - protein, 290 aa, Mus musculus
  source 1..290: note = sp|Q9EP73
MRIFAGIIFTACCHLLRAFTITAPKDLYVVEYGSNVTMECRFPVERELDLLALVVYWEKEDEQVIQFVAGEEDLKPQHSNFRGRASLPKDQLLKGNAALQITDVKLQDAGVYCCIISYGGADYKRITLKVNAPYRKINQRISVDPATSEHELICQAEGYPEAEVIWTNSDHQPVSGKRSVTTSRTEGMLLNVTSSLRVNATANDVFYCTFWRSQPGQNHTAELIIPELPATHPPQNRTHWVLLGSILLFLIVVSTVLLFLRKQVRMLDVEKCGVEDTSSKNRNDTQFEET

SEQ ID NO: 4 - protein, 221 aa, Mus musculus
  source 1..221: note = sp|Q9EP73|19-239
FTITAPKDLYVVEYGSNVTMECRFPVERELDLLALVVYWEKEDEQVIQFVAGEEDLKPQHSNFRGRASLPKDQLLKGNAALQITDVKLQDAGVYCCIISYGGADYKRITLKVNAPYRKINQRISVDPATSEHELICQAEGYPEAEVIWTNSDHQPVSGKRSVTTSRTEGMLLNVTSSLRVNATANDVFYCTFWRSQPGQNHTAELIIPELPATHPPQNRTH

SEQ ID NO: 5 - protein, 290 aa, Macaca fascicularis
  source 1..290: note = tr|G7PSE7
MRIFAVFIFTIYWHLLNAFTVTVPKDLYVVEYGSNMTIECKFPVEKQLDLTSLIVYWEMEDKNIIQFVHGEEDLKVQHSNYRQRAQLLKDQLSLGNAALRITDVKLQDAGVYRCMISYGGADYKRITVKVNAPYNKINQRILVVDPVTSEHELTCQAEGYPKAEVIWTSSDHQVLSGKTTTTNSKREEKLLNVTSTLRINTTANEIFYCIFRRLDPEENHTAELVIPELPLALPPNERTHLVILGAIFLLLGVALTFIFYLRKGRMMDMKKCGIRVTNSKKQRDTQLEET

SEQ ID NO: 6 - protein, 220 aa, Macaca fascicularis
  source 1..220: note = tr|G7PSE7|19-238
FTVTVPKDLYVVEYGSNMTIECKFPVEKQLDLTSLIVYWEMEDKNIIQFVHGEEDLKVQHSNYRQRAQLLKDQLSLGNAALRITDVKLQDAGVYRCMISYGGADYKRITVKVNAPYNKINQRILVVDPVTSEHELTCQAEGYPKAEVIWTSSDHQVLSGKTTTTNSKREEKLLNVTSTLRINTTANEIFYCIFRRLDPEENHTAELVIPELPLALPPNER

SEQ ID NO: 7 - protein, 273 aa, Homo sapiens
  source 1..273: note = sp|Q9BQ51|PD1L2_HUMAN Programmed cell death 1 ligand 2 OS=Homo sapiens OX=9606 GN=PDCD1LG2 PE=1 SV=2
MIFLLLMLSLELQLHQIAALFTVTVPKELYIIEHGSNVTLECNFDTGSHVNLGAITASLQKVENDTSPHRERATLLEEQLPLGKASFHIPQVQVRDEGQYQCIIIYGVAWDYKYLTLKVKASYRKINTHILKVPETDEVELTCQATGYPLAEVSWPNVSVPANTSHSRTPEGLYQVTSVLRLKPPPGRNFSCVFWNTHVRELTLASIDLQSQMEPRTHPTWLLHIFIPFCIIAFIFIATVIALRKQLCQKLYSSKDTTKRPVTTTKREVNSAI

SEQ ID NO: 8 - protein, 201 aa, Homo sapiens
  source 1..201: note = sp|Q9BQ51|20-220
LFTVTVPKELYIIEHGSNVTLECNFDTGSHVNLGAITASLQKVENDTSPHRERATLLEEQLPLGKASFHIPQVQVRDEGQYQCIIIYGVAWDYKYLTLKVKASYRKINTHILKVPETDEVELTCQATGYPLAEVSWPNVSVPANTSHSRTPEGLYQVTSVLRLKPPPGRNFSCVFWNTHVRELTLASIDLQSQMEPRTHPT

SEQ ID NO: 9 - protein, 247 aa, Mus musculus
  source 1..247: note = sp|Q9WUL5|PD1L2_MOUSE Programmed cell death 1 ligand 2 OS=Mus musculus OX=10090 GN=Pdcd1lg2 PE=1 SV=1
MLLLLPILNLSLQLHPVAALFTVTAPKEVYTVDVGSSVSLECDFDRRECTELEGIRASLQKVENDTSLQSERATLLEEQLPLGKALFHIPSVQVRDSGQYRCLVICGAAWDYKYLTVKVKASYMRIDTRILEVPGTGEVQLTCQARGYPLAEVSWQNVSVPANTSHIRTPEGLYQVTSVLRLKPQPSRNFSCMFWNAHMKELTSAIIDPLSRMEPKVPRTWPLHVFIPACTIALIFLAIVIIQRKRI

SEQ ID NO: 10 - protein, 202 aa, Mus musculus
  source 1..202: note = sp|Q9WUL5|20-221
LFTVTAPKEVYTVDVGSSVSLECDFDRRECTELEGIRASLQKVENDTSLQSERATLLEEQLPLGKALFHIPSVQVRDSGQYRCLVICGAAWDYKYLTVKVKASYMRIDTRILEVPGTGEVQLTCQARGYPLAEVSWQNVSVPANTSHIRTPEGLYQVTSVLRLKPQPSRNFSCMFWNAHMKELTSAIIDPLSRMEPKVPRTW

SEQ ID NO: 11 - protein, 273 aa, Macaca fascicularis
  source 1..273: note = EHH57412.1 Programmed cell death 1 ligand 2, partial [Macaca fascicularis]
MIFLLLMLSLELQLHQTAALFTVTVPKELYIIEHGSNATLECNFDTGSHVNLGAITASLQKVENDTSPHRERATLLEEQLSLGKALFHIPQVQVRDEGQYQCIIIYGVAWDYKYLTLKVKASYRKINTHILKVPETDEVELTCQATGYPLAEVSWPNISVPANTSHSRTPEGLYQVTSVLRLKPHPGRNFSCVFWNAQVRELTLASIDLQSQIEPRTHPTWLLHIFIPSCIIAFIFIATVIALRKQLCQKLYSSKDTTKRSVTTKKREVNSAV

SEQ ID NO: 12 - protein, 201 aa, Macaca fascicularis
  source 1..201: note = EHH57412.1|20-220
LFTVTVPKELYIIEHGSNATLECNFDTGSHVNLGAITASLQKVENDTSPHRERATLLEEQLSLGKALFHIPQVQVRDEGQYQCIIIYGVAWDYKYLTLKVKASYRKINTHILKVPETDEVELTCQATGYPLAEVSWPNISVPANTSHSRTPEGLYQVTSVLRLKPHPGRNFSCVFWNAQVRELTLASIDLQSQIEPRTHPT

SEQ ID NO: 13 - protein, 220 aa, Homo sapiens
  source 1..220: note = sp|P10747|CD28_HUMAN T-cell-specific surface glycoprotein CD28 OS=Homo sapiens OX=9606 GN=CD28 PE=1 SV=1
MLRLLLALNLFPSIQVTGNKILVKQSPMLVAYDNAVNLSCKYSYNLFSREFRASLHKGLDSAVEVCVVYGNYSQQLQVYSKTGFNCDGKLGNESVTFYLQNLYVNQTDIYFCKIEVMYPPPYLDNEKSNGTIIHVKGKHLCPSPLFPGPSKPFWVLVVVGGVLACYSLLVTVAFIIFWVRSKRSRLLHSDYMNMTPRRPGPTRKHYQPYAPPRDFAAYRS

SEQ ID NO: 14 - protein, 134 aa, Homo sapiens
  source 1..134: note = sp|P10747|19-152
NKILVKQSPMLVAYDNAVNLSCKYSYNLFSREFRASLHKGLDSAVEVCVVYGNYSQQLQVYSKTGFNCDGKLGNESVTFYLQNLYVNQTDIYFCKIEVMYPPPYLDNEKSNGTIIHVKGKHLCPSPLFPGPSKP

SEQ ID NO: 15 - protein, 218 aa, Mus musculus
  source 1..218: note = sp|P31041|CD28_MOUSE T-cell-specific surface glycoprotein CD28 OS=Mus musculus OX=10090 GN=Cd28 PE=1; SV = 2
MTLRLLFLALNFFSVQVTENKILVKQSPLLVVDSNEVSLSCRYSYNLLAKEFRASLYKGVNSDVEVCVGNGNFTYQPQFRSNAEFNCDGDFDNETVTFRLWNLHVNHTDIYFCKIEFMYPPPYLDNERSNGTIIHIKEKHLCHTQSSPKLFWALVVVAGVLFCYGLLVTVALCVIWTNSRRNRLLQSDYMNMTPRRPGLTRKPYQPYAPARDFAAYRP

SEQ ID NO: 16 - protein, 131 aa, Mus musculus
  source 1..131: note = sp|P31041|20-150
NKILVKQSPLLVVDSNEVSLSCRYSYNLLAKEFRASLYKGVNSDVEVCVGNGNFTYQPQFRSNAEFNCDGDFDNETVTFRLWNLHVNHTDIYFCKIEFMYPPPYLDNERSNGTIIHIKEKHLCHTQSSPKL

SEQ ID NO: 17 - protein, 220 aa, Macaca fascicularis
  source 1..220: note = tr|Q0PDN3|Q0PDN3_MACFA CD28 OS=Macaca fascicularis; OX = 9541 GN=CD28 PE=2 SV=1
MLRLLLALNLLPSIQVTGNKILVKQSPMLVAYDNAVNLSCKYSYNLFSREFRASLHKGLDSAVEVCVVYGNYSQQLQVYSKTGFNCDGKLGNESVTFYLQNLYVNQTDIYFCKIEVMYPPPYLDNEKSNGTIIHVKGKHLCPSPLFPGPSKPFWALVVVGGVLACYSLLVTVAFCIFWMRSKRSRLLHSDYMNMTPRRPGPTRKHYQPYAPPRDFAAYRS

SEQ ID NO: 18 - protein, 584 aa, Macaca fascicularis
  source 1..584: note = XP_015308533.1 PREDICTED: CD276 antigen isoform X1 [Macaca fascicularis]
MKLSSDHVFPLFRKLQWLPAAFRIQFTPVSPSAGAAFHHGEPSCQLPHSKMLHRRGSPGMGVHVGAALGALWFCLTGALEVQVPEDPVVALVGTDATLRCSFSPEPGFSLAQLNLIWQLTDTKQLVHSFTEGRDQGSAYANRTALFLDLLAQGNASLRLQRVRVADEGSFTCFVSIRDFGSAAVSLQVAAPYSKPSMTLEPNKDLRPGDTVTITCSSYRGYPEAEVFWQDGQGAPLTGNVTTSQMANEQGLFDVHSVLRVVLGANGTYSCLVRNPVLQQDAHGSITITPQRSPTGAVEVQVPEDPVVALVGTDATLRCSFSPEPGFSLAQLNLIWQLTDTKQLVHSFTEGRDQGSAYANRTALFLDLLAQGNASLRLQRVRVADEGSFTCFVSIRDFGSAAVSLQVAAPYSKPSMTLEPNKDLRPGDTVTITCSSYRGYPEAEVFWQDGQGAPLTGNVTTSQMANEQGLFDVHSVLRVVLGANGTYSCLVRNPVLQQDAHGSVTITGQPMTFPPEALWVTVGLSVCLVALLVALAFVCWRKIKQSCEEENAGAEDQDGEGEGSKTALQPLKHSDSKEDDGQELA

SEQ ID NO: 19 - protein, 438 aa, Macaca fascicularis
  source 1..438: note = XP_015308533.1|79-516
LEVQVPEDPVVALVGTDATLRCSFSPEPGFSLAQLNLIWQLTDTKQLVHSFTEGRDQGSAYANRTALFLDLLAQGNASLRLQRVRVADEGSFTCFVSIRDFGSAAVSLQVAAPYSKPSMTLEPNKDLRPGDTVTITCSSYRGYPEAEVFWQDGQGAPLTGNVTTSQMANEQGLFDVHSVLRVVLGANGTYSCLVRNPVLQQDAHGSITITPQRSPTGAVEVQVPEDPVVALVGTDATLRCSFSPEPGFSLAQLNLIWQLTDTKQLVHSFTEGRDQGSAYANRTALFLDLLAQGNASLRLQRVRVADEGSFTCFVSIRDFGSAAVSLQVAAPYSKPSMTLEPNKDLRPGDTVTITCSSYRGYPEAEVFWQDGQGAPLTGNVTTSQMANEQGLFDVHSVLRVVLGANGTYSCLVRNPVLQQDAHGSVTITGQPMTFPPEA

SEQ ID NO: 20 - protein, 107 aa, synthetic construct [sequence omitted]

SEQ ID NO: 21 - protein, 125 aa, synthetic construct
  source 1..125: note = 13G1[PDL1]_H1L1 Variable heavy (vh) domain
QVQLVESGGGLVKPGGSLRLSCAASGFTFSDYYMSWIRQAPGKGLEWVSYISSSSSYTNYADSVKGRFTISRDNAKNSLYLQMNSLRAEDTAVYYCASHFVILPGAIRPEYFQHWGQGTLVTVSS

SEQ ID NO: 22 - protein, 5 aa, synthetic construct
  source 1..5: note = 13G1[PDL1]_H1L1 vhCDR1
DYYMS

SEQ ID NO: 23 - protein, 17 aa, synthetic construct
  source 1..17: note = 13G1[PDL1]_H1L1 vhCDR2
YISSSSSYTNYADSVKG

SEQ ID NO: 24 - protein, 16 aa, synthetic construct
  source 1..16: note = 13G1[PDL1]_H1L1 vhCDR3
HFVILPGAIRPEYFQH

SEQ ID NO: 25 - protein, 107 aa, synthetic construct [sequence omitted]

SEQ ID NO: 26 - protein, 11 aa, synthetic construct
  source 1..11: note = 13G1[PDL1]_H1L1 vlCDR1
RASQSVSSYLA

SEQ ID NO: 27 - protein, 7 aa, synthetic construct
  source 1..7: note = 13G1[PDL1]_H1L1 vlCDR2
DASNRAT

SEQ ID NO: 28 - protein, 9 aa, synthetic construct
  source 1..9: note = 13G1[PDL1]_H1L1 vlCDR3
QQRSNWPPT

SEQ ID NO: 29 - protein, 121 aa, synthetic construct
  source 1..121: note = 13G7[PDL1]_H1L1 Variable heavy (vh) domain
QVQLQESGPGLVKPSETLSLTCTVSGGSISSYFWSWIRQPPGKGLEWIGYIYYSGSTNYNPSLKSRVTISVDTSKNQFSLKLSSVTAADTAVYYCARGPLIQLWLPPFDYWGQGTLVTVSS

SEQ ID NO: 30 - protein, 5 aa, synthetic construct
  source 1..5: note = 13G7[PDL1]_H1L1 vhCDR1
SYFWS

SEQ ID NO: 31 - protein, 16 aa, synthetic construct
  source 1..16: note = 13G7[PDL1]_H1L1 vhCDR2
YIYYSGSTNYNPSLKS

SEQ ID NO: 32 - protein, 13 aa, synthetic construct
  source 1..13: note = 13G7[PDL1]_H1L1 vhCDR3
GPLIQLWLPPFDY

SEQ ID NO: 33 - protein, 107 aa, synthetic construct
  source 1..107: note = 13G7[PDL1]_H1L1 Variable light (vl) domain
DIQLTQSPATLSLSPGERATLSCRASQSVSSYLAWYQQKPGQAPRLLIYDASNRATGIPARFSGSGSGTDFTLTISSLEPEDFAVYYCQQRGNWPPTFGQGTKVEIK

SEQ ID NO: 34 - protein, 11 aa, synthetic construct
  source 1..11: note = 13G7[PDL1]_H1L1 vlCDR1
RASQSVSSYLA

SEQ ID NO: 35 - protein, 7 aa, synthetic construct
  source 1..7: note = 13G7[PDL1]_H1L1 vlCDR2
DASNRAT

SEQ ID NO: 36 - protein, 9 aa, synthetic construct
  source 1..9: note = 13G7[PDL1]_H1L1 vlCDR3
QQRGNWPPT

SEQ ID NO: 37 - protein, 121 aa, synthetic construct; identical to SEQ ID NO: 29
  source 1..121: note = 13G7[PDL1]_H2L2 Variable heavy (vh) domain

SEQ ID NO: 38 - protein, 5 aa, synthetic construct
  source 1..5: note = 13G7[PDL1]_H2L2 vhCDR1
SYFWS

SEQ ID NO: 39 - protein, 16 aa, synthetic construct
  source 1..16: note = 13G7[PDL1]_H2L2 vhCDR2
YIYYSGSTNYNPSLKS

SEQ ID NO: 40 - protein, 13 aa, synthetic construct
  source 1..13: note = 13G7[PDL1]_H2L2 vhCDR3
GPLIQLWLPPFDY

SEQ ID NO: 41 - protein, 124 aa, synthetic construct
  source 1..124: note = 5C11[PDL2]_H1L1 Variable heavy (vh) domain
QVQLVQSGAEVKKPGSSVKVSCKASGGTFRNYAITWVRQAPGQGLEWMGRIIPILAIANYAQKFQGRVTITADKSTSTVYMELSSLRSEDTAVYYCATDLGIAAAGRAEYFQHWGQGTLVTVSS

SEQ ID NO: 42 - protein, 5 aa, synthetic construct
  source 1..5: note = 5C11[PDL2]_H1L1 vhCDR1
NYAIT

SEQ ID NO: 43 - protein, 17 aa, synthetic construct
  source 1..17: note = 5C11[PDL2]_H1L1 vhCDR2
RIIPILAIANYAQKFQG

SEQ ID NO: 44 - protein, 15 aa, synthetic construct
  source 1..15: note = 5C11[PDL2]_H1L1 vhCDR3
DLGIAAAGRAEYFQH

SEQ ID NO: 45 - protein, 107 aa, synthetic construct
  source 1..107: note = 5C11[PDL2]_H1L1 Variable light (vl) domain
EIVMTQSPATLSLSPGERATLSCRASQSVSSYLAWYQQKPGQAPRLLIYDASNRATGIPARFSGSGSGTDFTLTISSLEPEDFAVYYCQQRSNWPPTFGQGTKVEIK

SEQ ID NO: 46 - protein, 11 aa, synthetic construct
  source 1..11: note = 5C11[PDL2]_H1L1 vlCDR1
RASQSVSSYLA

SEQ ID NO: 47 - protein, 7 aa, synthetic construct
  source 1..7: note = 5C11[PDL2]_H1L1 vlCDR2
DASNRAT

SEQ ID NO: 48 - protein, 9 aa, synthetic construct
  source 1..9: note = 5C11[PDL2]_H1L1 vlCDR3
QQRSNWPPT

SEQ ID NO: 49 - protein, 124 aa, synthetic construct; identical to SEQ ID NO: 41
  source 1..124: note = 5C11[PDL2]_H2 Variable heavy (vh) domain

SEQ ID NO: 50 - protein, 5 aa, synthetic construct
  source 1..5: note = 5C11[PDL2]_H2 vhCDR1
NYAIT

SEQ ID NO: 51 - protein, 17 aa, synthetic construct
  source 1..17: note = 5C11[PDL2]_H2 vhCDR2
RIIPILAIANYAQKFQG

SEQ ID NO: 52 - protein, 15 aa, synthetic construct
  source 1..15: note = 5C11[PDL2]_H2 vhCDR3
DLGIAAAGRAEYFQH

SEQ ID NO: 53 - protein, 125 aa, synthetic construct
  source 1..125: note = 8G2[PDL2]_H1L1 Variable heavy (vh) domain
QVQLVQSGAEVKKPGSSVKVSCKASGVNFRNYAISWVRQAPGQGLEWMGRIIPVVGKAHYEQRFQGRVTMTADKSPTPAYMELSSLSSEDPAVYYCARDGPGIGVAGRGYYFDYWGQGTLVTVSS

SEQ ID NO: 54 - protein, 5 aa, synthetic construct
  source 1..5: note = 8G2[PDL2]_H1L1 vhCDR1
NYAIS

SEQ ID NO: 55 - protein, 17 aa, synthetic construct
  source 1..17: note = 8G2[PDL2]_H1L1 vhCDR2
RIIPVVGKAHYEQRFQG

SEQ ID NO: 56 - protein, 16 aa, synthetic construct
  source 1..16: note = 8G2[PDL2]_H1L1 vhCDR3
DGPGIGVAGRGYYFDY

SEQ ID NO: 57 - protein, 107 aa, synthetic construct; identical to SEQ ID NO: 45
  source 1..107: note = 8G2[PDL2]_H1L1 Variable light (vl) domain

SEQ ID NO: 58 - protein, 11 aa, synthetic construct
  source 1..11: note = 8G2[PDL2]_H1L1 vlCDR1
RASQSVSSYLA

SEQ ID NO: 59 - protein, 7 aa, synthetic construct
  source 1..7: note = 8G2[PDL2]_H1L1 vlCDR2
DASNRAT

SEQ ID NO: 60 - protein, 9 aa, synthetic construct
  source 1..9: note = 8G2[PDL2]_H1L1 vlCDR3
QQRSNWPPT

SEQ ID NO: 61 - protein, 125 aa, synthetic construct
  source 1..125: note = 8G2[PDL2]_H2 Variable heavy (vh) domain
QVQLVQSGAEVKKPGSSVKVSCKASGVNFRNYAISWVRQAPGQGLEWMGRIIPVVGKAHYEQKFQGRVTITADKSTTTAYMELSSLRSEDTAVYYCARDGPGIGVAGRGYYFDYWGQGTLVTVSS

SEQ ID NO: 62 - protein, 5 aa, synthetic construct
  source 1..5: note = 8G2[PDL2]_H2 vhCDR1
NYAIS

SEQ ID NO: 63 - protein, 17 aa, synthetic construct
  source 1..17: note = 8G2[PDL2]_H2 vhCDR2
RIIPVVGKAHYEQKFQG

SEQ ID NO: 64 - protein, 16 aa, synthetic construct
  source 1..16: note = 8G2[PDL2]_H2 vhCDR3
DGPGIGVAGRGYYFDY

SEQ ID NO: 65 - protein, 124 aa, synthetic construct
  source 1..124: note = 8G5[PDL2]_H1L1 Variable heavy (vh) domain
QVQLVQSGAEVKKPGSSVKVSCKASGGSLRNYAISWVRQAPGQGLEWMGRIIYILGIANYAQNFQGRVTITADKSTSTAYMELSSLRSEDTAVYYCARSGSQQLIEGADAFDIWGQGTMVTVSS

SEQ ID NO: 66 - protein, 5 aa, synthetic construct
  source 1..5: note = 8G5[PDL2]_H1L1 vhCDR1
NYAIS

SEQ ID NO: 67 - protein, 17 aa, synthetic construct
  source 1..17: note = 8G5[PDL2]_H1L1 vhCDR2
RIIYILGIANYAQNFQG

SEQ ID NO: 68 - protein, 15 aa, synthetic construct
  source 1..15: note = 8G5[PDL2]_H1L1 vhCDR3
SGSQQLIEGADAFDI

SEQ ID NO: 69 - protein, 107 aa, synthetic construct; identical to SEQ ID NO: 45
  source 1..107: note = 8G5[PDL2]_H1L1 Variable light (vl) domain

SEQ ID NO: 70 - protein, 11 aa, synthetic construct
  source 1..11: note = 8G5[PDL2]_H1L1 vlCDR1
RASQSVSSYLA

SEQ ID NO: 71 - protein, 7 aa, synthetic construct
  source 1..7: note = 8G5[PDL2]_H1L1 vlCDR2
DASNRAT

SEQ ID NO: 72 - protein, 9 aa, synthetic construct
  source 1..9: note = 8G5[PDL2]_H1L1 vlCDR3
QQRSNWPPT

SEQ ID NO: 73 - protein, 124 aa, synthetic construct
  source 1..124: note = 8G5[PDL2]_H3 Variable heavy (vh) domain
QVQLVQSGAEVKKPGSSVKVSCKASGGSLRNYAISWVRQAPGQGLEWMGRIIYILGIANYAQKFQGRVTITADKSTSTAYMELSSLRSEDTAVYYCARSGSQQLIEGADAFDIWGQGTMVTVSS

SEQ ID NO: 74 - protein, 5 aa, synthetic construct
  source 1..5: note = 8G5[PDL2]_H3 vhCDR1
NYAIS

SEQ ID NO: 75 - protein, 17 aa, synthetic construct
  source 1..17: note = 8G5[PDL2]_H3 vhCDR2
RIIYILGIANYAQKFQG

SEQ ID NO: 76 - protein, 15 aa, synthetic construct
  source 1..15: note = 8G5[PDL2]_H3 vhCDR3
SGSQQLIEGADAFDI

SEQ ID NO: 77 - protein, 120 aa, synthetic construct
  source 1..120: note = 16G11[PDL2]_H1L1 Variable heavy (vh) domain
QVQLVESGPGLVKPSGTLSLTCAVSGGSISSSNWWSWVRQPPGKGLEWIGEIFHIGSTNYNPSLKSRVTISVDKSKNQFSLNLSSVTAADTAVYYCARVSFGDSYYFDYWGQGTLVTVSS

SEQ ID NO: 78 - protein, 6 aa, synthetic construct
  source 1..6: note = 16G11[PDL2]_H1L1 vhCDR1
SSNWWS

SEQ ID NO: 79 - protein, 16 aa, synthetic construct
  source 1..16: note = 16G11[PDL2]_H1L1 vhCDR2
EIFHIGSTNYNPSLKS

SEQ ID NO: 80 - protein, 11 aa, synthetic construct
  source 1..11: note = 16G11[PDL2]_H1L1 vhCDR3
VSFGDSYYFDY

SEQ ID NO: 81 - protein, 107 aa, synthetic construct
  source 1..107: note = 16G11[PDL2]_H1L1 Variable light (vl) domain
DIQLTQSPATLSLSPGERATLSCRARQSVSSYLAWYQQKPGQAPRLLIYDASNRATGIPARFSGSGSGTDFTLTISSLEPEDFAVYYCQQRSNWPPTFGQGTKVEIK

SEQ ID NO: 82 - protein, 11 aa, synthetic construct
  source 1..11: note = 16G11[PDL2]_H1L1 vlCDR1
RARQSVSSYLA

SEQ ID NO: 83 - protein, 7 aa, synthetic construct
  source 1..7: note = 16G11[PDL2]_H1L1 vlCDR2
DASNRAT

SEQ ID NO: 84 - protein, 9 aa, synthetic construct
  source 1..9: note = 16G11[PDL2]_H1L1 vlCDR3
QQRSNWPPT

SEQ ID NO: 85 - protein, 120 aa, synthetic construct
  source 1..120: note = 16G11[PDL2]_H2 Variable heavy (vh) domain
QVQLQESGSGLVKPPGTLSLTCAVSGGSISSSNWWSWVRQPPGKGLEWIGEIFHIGSTNYNPSLKSRVTISVDKSKNQFSLKLSSVTAADTAVYYCARVSFGDSYYFDYWGQGTLVTVSS

SEQ ID NO: 86 - protein, 6 aa, synthetic construct
  source 1..6: note = 16G11[PDL2]_H2 vhCDR1
SSNWWS

SEQ ID NO: 87 - protein, 16 aa, synthetic construct
  source 1..16: note = 16G11[PDL2]_H2 vhCDR2
EIFHIGSTNYNPSLKS

SEQ ID NO: 88 - protein, 11 aa, synthetic construct
  source 1..11: note = 16G11[PDL2]_H2 vhCDR3
VSFGDSYYFDY

SEQ ID NO: 89 - protein, 120 aa, synthetic construct
  source 1..120: note = 1B1-5.88488[CD28]_H1L1 Variable heavy (vh) domain
EVQLVESGGGLVQPGGSLRLSCAASGFTFSSYWMHWVRQAPGKGLMWVSRINSDGSTASHADSVRGRFTISRDNAKNTLYLQLNGLRAEDTAVYYCARADSTTWYEFDFWGQGALVTVSS

SEQ ID NO: 90 - protein, 5 aa, synthetic construct
  source 1..5: note = 1B1-5.88488[CD28]_H1L1 vhCDR1
SYWMH

SEQ ID NO: 91 - protein, 17 aa, synthetic construct
  source 1..17: note = 1B1-5.88488[CD28]_H1L1 vhCDR2
RINSDGSTASHADSVRG

SEQ ID NO: 92 - protein, 11 aa, synthetic construct
  source 1..11: note = 1B1-5.88488[CD28]_H1L1 vhCDR3
ADSTTWYEFDF

SEQ ID NO: 93 - protein, 107 aa, synthetic construct
  source 1..107: note = 1B1-5.88488[CD28]_H1L1 Variable light (vl) domain
EIVLTQSPATLSLSPGERATLSCRASQSVSSYLAWYQQKPGQAPRLLIYDASKRATGIPARFSGTGSGTDFTLTISSLEPEDFAVYSCQQRHNWPPTFGQGTKVEIK

SEQ ID NO: 94 - protein, 11 aa, synthetic construct
  source 1..11: note = 1B1-5.88488[CD28]_H1L1 vlCDR1
RASQSVSSYLA

SEQ ID NO: 95 - protein, 7 aa, synthetic construct
  source 1..7: note = 1B1-5.88488[CD28]_H1L1 vlCDR2
DASKRAT

SEQ ID NO: 96 - protein, 9 aa, synthetic construct
  source 1..9: note = 1B1-5.88488[CD28]_H1L1 vlCDR3
QQRHNWPPT

SEQ ID NO: 97 - protein, 125 aa, synthetic construct
  source 1..125: note = 1B1-4.88488[CD28]_H1L1 Variable heavy (vh) domain
EVQLVESGGGLVQPGGSLTLSCAASGFTVSSNFMSWFRQAPGKGLEWVSVIYSGGYTHYADSVKGRFTISRHKSKNTLFLQMNSLRSEDSAVYYCARHGISGTAGDYYYYGMDVWGQGTTVTVSS

SEQ ID NO: 98 - protein, 5 aa, synthetic construct
  source 1..5: note = 1B1-4.88488[CD28]_H1L1 vhCDR1
SNFMS

SEQ ID NO: 99 - protein, 16 aa, synthetic construct
  source 1..16: note = 1B1-4.88488[CD28]_H1L1 vhCDR2
VIYSGGYTHYADSVKG

SEQ ID NO: 100 - protein, 17 aa, synthetic construct
  source 1..17: note = 1B1-4.88488[CD28]_H1L1 vhCDR3
HGISGTAGDYYYYGMDV

SEQ ID NO: 101 - protein, 107 aa, synthetic construct; identical to SEQ ID NO: 93
  source 1..107: note = 1B1-4.88488[CD28]_H1L1 Variable light (vl) domain

SEQ ID NO: 102 - protein, 11 aa, synthetic construct
  source 1..11: note = 1B1-4.88488[CD28]_H1L1 vlCDR1
RASQSVSSYLA

SEQ ID NO: 103 - protein, 7 aa, synthetic construct
  source 1..7: note = 1B1-4.88488[CD28]_H1L1 vlCDR2
DASKRAT

SEQ ID NO: 104 - protein, 9 aa, synthetic construct
  source 1..9: note = 1B1-4.88488[CD28]_H1L1 vlCDR3
QQRHNWPPT

SEQ ID NO: 105 - protein, 120 aa, synthetic construct
  source 1..120: note = 1D8.88474[CD28]_H1L1 Variable heavy (vh) domain
EVQLVESGGGLVQPGGSLRLSCAASGFTLSGYWIHWVRQAPGKGLVWVSRINNDGSSTSHADSVRGRFTISRDSAKNTLYLHMNNLRAEDTAVYYCVRAYSSSWYRFDYWGQGTLVTVSS

SEQ ID NO: 106 - protein, 5 aa, synthetic construct
  source 1..5: note = 1D8.88474[CD28]_H1L1 vhCDR1
GYWIH

SEQ ID NO: 107 - protein, 17 aa, synthetic construct
  source 1..17: note = 1D8.88474[CD28]_H1L1 vhCDR2
RINNDGSSTSHADSVRG

SEQ ID NO: 108 - protein, 11 aa, synthetic construct
  source 1..11: note = 1D8.88474[CD28]_H1L1 vhCDR3
AYSSSWYRFDY

SEQ ID NO: 109 - protein, 107 aa, synthetic construct
  source 1..107: note = 1D8.88474[CD28]_H1L1 Variable light (vl) domain
EIVLTQSPATLSLSPGERATLSCRASQSVSSYLAWYQQKPGQAPRLLIYDASNRATGIPARFSGSGSGTDFTLTISSLEPEDFAVYYCQQRNNWPPTFGQGTKVEIK

SEQ ID NO: 110 - protein, 11 aa, synthetic construct
  source 1..11: note = 1D8.88474[CD28]_H1L1 vlCDR1
RASQSVSSYLA

SEQ ID NO: 111 - protein, 7 aa, synthetic construct
  source 1..7: note = 1D8.88474[CD28]_H1L1 vlCDR2
DASNRAT

SEQ ID NO: 112 - protein, 9 aa, synthetic construct
  source 1..9: note = 1D8.88474[CD28]_H1L1 vlCDR3
QQRNNWPPT

SEQ ID NO: 113 - protein, 124 aa, synthetic construct
  source 1..124: note = 1G2-2.88474[CD28]_H1L1 Variable heavy (vh) domain
EVQLVESGGGLVQPGGSLRLSCAASGFTVRSNFMSWFRQVPGKGLEWVSVIYSGGSTHYADSVKGRFTISRHNSENTLFLQMNSLRTEDTAVYYCARHGISGTTSYYYYGMDVWGQGTTVTVSS

SEQ ID NO: 114 - protein, 5 aa, synthetic construct
  source 1..5: note = 1G2-2.88474[CD28]_H1L1 vhCDR1
SNFMS

SEQ ID NO: 115 - protein, 16 aa, synthetic construct
  source 1..16: note = 1G2-2.88474[CD28]_H1L1 vhCDR2
VIYSGGSTHYADSVKG

SEQ ID NO: 116 - protein, 16 aa, synthetic construct
  source 1..16: note = 1G2-2.88474[CD28]_H1L1 vhCDR3
HGISGTTSYYYYGMDV

SEQ ID NO: 117 - protein, 107 aa, synthetic construct
  source 1..107: note = 1G2-2.88474[CD28]_H1L1 Variable light (vl) domain
EIVLTQSPATLSLSPGERATLSCRASQSVSTYLAWYQQKPGQAPRLLIYDASNRATGIPARFSGSGSGTDFTLTISSLEPEDFAVYYCQQRSNWPPTFGQGTKVEIK

SEQ ID NO: 118 - protein, 11 aa, synthetic construct
  source 1..11: note = 1G2-2.88474[CD28]_H1L1 vlCDR1
RASQSVSTYLA

SEQ ID NO: 119 - protein, 7 aa, synthetic construct
  source 1..7: note = 1G2-2.88474[CD28]_H1L1 vlCDR2
DASNRAT

SEQ ID NO: 120 - protein, 9 aa, synthetic construct
  source 1..9: note = 1G2-2.88474[CD28]_H1L1 vlCDR3
QQRSNWPPT

SEQ ID NO: 121 - protein, 118 aa, synthetic construct
  source 1..118: note = 2G5.88497[CD28]_H1L1 Variable heavy (vh) domain
EVQLVESGGDLVQPGGSLRLSCAASGFAFSSYWMHWVRQVPGKGLVWVSRINNDGSSASHADSVRGRFTISRDNARNTLHLQMNSLTAEDTAVYYCARGQQWFLLDYWGQGTLVTVSS

SEQ ID NO: 122 - protein, 5 aa, synthetic construct
  source 1..5: note = 2G5.88497[CD28]_H1L1 vhCDR1
SYWMH

SEQ ID NO: 123 - protein, 17 aa, synthetic construct
  source 1..17: note = 2G5.88497[CD28]_H1L1 vhCDR2
RINNDGSSASHADSVRG

SEQ ID NO: 124 - protein, 9 aa, synthetic construct
  source 1..9: note = 2G5.88497[CD28]_H1L1 vhCDR3
GQQWFLLDY

SEQ ID NO: 125 - protein, 107 aa, synthetic construct
  source 1..107: note = 2G5.88497[CD28]_H1L1 Variable light (vl) domain
EIVLTQSPATLSLSPGERATLSCRASQSINSYLAWYQQKPGQAPRLLIYDASNRATGIPARFSGSGSGTDFTLTISSLEPEDFAVYYCQQSSNWPPTFGQGTKVEIK

SEQ ID NO: 126 - protein, 11 aa, synthetic construct
  source 1..11: note = 2G5.88497[CD28]_H1L1 vlCDR1
RASQSINSYLA

SEQ ID NO: 127 - protein, 7 aa, synthetic construct
  source 1..7: note = 2G5.88497[CD28]_H1L1 vlCDR2
DASNRAT

SEQ ID NO: 128 - protein, 9 aa, synthetic construct
  source 1..9: note = 2G5.88497[CD28]_H1L1 vlCDR3
QQSSNWPPT

SEQ ID NO: 129 - protein, 119 aa, synthetic construct
  source 1..119: note = 2A3.88497[CD28]_H1L1 Variable heavy (vh) domain
EVQLVESGGGLVKPGGSLRLSCAASGFTFSTYTMNWVRQAPGKGLEWVSSISTSSSHIYYADSVKGRFTISRDNAKNSLYLQMNSLRADDTAVYYCAREGNIVLTFDPWGQGTLVTVSS

SEQ ID NO: 130 - protein, 5 aa, synthetic construct
  source 1..5: note = 2A3.88497[CD28]_H1L1 vhCDR1
TYTMN

SEQ ID NO: 131 - protein, 17 aa, synthetic construct
  source 1..17: note = 2A3.88497[CD28]_H1L1 vhCDR2
SISTSSSHIYYADSVKG

SEQ ID NO: 132 - protein, 10 aa, synthetic construct
  source 1..10: note = 2A3.88497[CD28]_H1L1 vhCDR3
EGNIVLTFDP

SEQ ID NO: 133 - protein, 107 aa, synthetic construct
  source 1..107: note = 2A3.88497[CD28]_H1L1 Variable light (vl) domain
EIVLTQSPATLSLSPGERATLSCRASQSVSSYLAWYQQKPGQAPRLLIYDASNRATGIPARFSGSGSGTDFTLTISSLEPEDFAVYYCQQRGYWPPTFGQGTKVEIK

SEQ ID NO: 134 - protein, 11 aa, synthetic construct
  source 1..11: note = 2A3.88497[CD28]_H1L1 vlCDR1
RASQSVSSYLA

SEQ ID NO: 135 - protein, 7 aa, synthetic construct
  source 1..7: note = 2A3.88497[CD28]_H1L1 vlCDR2
DASNRAT

SEQ ID NO: 136 - protein, 9 aa, synthetic construct
  source 1..9: note = 2A3.88497[CD28]_H1L1 vlCDR3
QQRGYWPPT

SEQ ID NO: 137 - protein, 120 aa, synthetic construct
  source 1..120: note = 1D9-3.83967[CD28]_H1L1 Variable heavy (vh) domain
EVQLVESGGGLVQPGGSLRLSCAASGFTFSSYWMHWVRQAPGKGLVWVSRINSDGSSASHADSVRGRFTISRDNAKNTLYLQMNSLRAEDTAVYYCARAPSSSWYDFDYWGQGTLITVSS

SEQ ID NO: 138 - protein, 5 aa, synthetic construct
  source 1..5: note = 1D9-3.83967[CD28]_H1L1 vhCDR1
SYWMH

SEQ ID NO: 139 - protein, 17 aa, synthetic construct
  source 1..17: note = 1D9-3.83967[CD28]_H1L1 vhCDR2
RINSDGSSASHADSVRG

SEQ ID NO: 140 - protein, 11 aa, synthetic construct
  source 1..11: note = 1D9-3.83967[CD28]_H1L1 vhCDR3
APSSSWYDFDY

SEQ ID NO: 141 - protein, 107 aa, synthetic construct
  source 1..107: note = 1D9-3.83967[CD28]_H1L1 Variable light (vl) domain
EIVLTQSPATLSLSPGERATLSCRASQSVSRYLAWYQQKPGQAPRLLIYDASNRATGIPARFSGSGSGTDFTLTISSLEPEDFALYYCQQRSNWPPTFGQGTKVEIK

SEQ ID NO: 142 - protein, 11 aa, synthetic construct
  source 1..11: note = 1D9-3.83967[CD28]_H1L1 vlCDR1
RASQSVSRYLA

SEQ ID NO: 143 - protein, 7 aa, synthetic construct
  source 1..7: note = 1D9-3.83967[CD28]_H1L1 vlCDR2
DASNRAT

SEQ ID NO: 144 - protein, 9 aa, synthetic construct
  source 1..9: note = 1D9-3.83967[CD28]_H1L1 vlCDR3
QQRSNWPPT

SEQ ID NO: 145 - protein, 123 aa, synthetic construct
  source 1..123: note = 1C9-1.83967[CD28]_H1L1 Variable heavy (vh) domain
EVQLVESGGGLVQPGGSLRLSCAASGFTFSSYSMHWVRQAPGKGLKYVSAISSDGNSIYYTNSVKGRFAISRDNSKNTLYLQMGSLRAEDMGVYYCAGGVAAGHYFYSGMDVWGQGTTVTVSS

SEQ ID NO: 146 - protein, 5 aa, synthetic construct
  source 1..5: note = 1C9-1.83967[CD28]_H1L1 vhCDR1
SYSMH

SEQ ID NO: 147 - protein, 17 aa, synthetic construct
  source 1..17: note = 1C9-1.83967[CD28]_H1L1 vhCDR2
AISSDGNSIYYTNSVKG

SEQ ID NO: 148 - protein, 14 aa, synthetic construct
  source 1..14: note = 1C9-1.83967[CD28]_H1L1 vhCDR3
GVAAGHYFYSGMDV

SEQ ID NO: 149 - protein, 107 aa, synthetic construct
  source 1..107: note = 1C9-1.83967[CD28]_H1L1 Variable light (vl) domain
EIVLTQSPATLSLSPGERATLSCGASQSVSSSLAWYQQKPGQAPRLLIYDSSNRATGIPARFSGRGSGTDFTLTISSLEPEDFAVYYCQQRGNWPPTFGQGTKVEIK

SEQ ID NO: 150 - protein, 11 aa, synthetic construct
  source 1..11: note = 1C9-1.83967[CD28]_H1L1 vlCDR1
GASQSVSSSLA

SEQ ID NO: 151 - protein, 7 aa, synthetic construct
  source 1..7: note = 1C9-1.83967[CD28]_H1L1 vlCDR2
DSSNRAT

SEQ ID NO: 152 - protein, 9 aa, synthetic construct
  source 1..9: note = 1C9-1.83967[CD28]_H1L1 vlCDR3
QQRGNWPPT

SEQ ID NO: 153 - protein, 120 aa, synthetic construct
  source 1..120: note = 1D10-4.83967[CD28]_H1L1 Variable heavy (vh) domain
EVQLVESGGGLVQPGGSLRLSCAASGFTFSDYWMHWVRQPPGKGLMWVSRINSDGSTASHADSVRDRFSISRDNAKNTLYLQLNGLRAEDTAVYYCARADNTTWYEFDFWGQGALVTVSS

SEQ ID NO: 154 - protein, 5 aa, synthetic construct
  source 1..5: note = 1D10-4.83967[CD28]_H1L1 vhCDR1
DYWMH

SEQ ID NO: 155 - protein, 17 aa, synthetic construct
  source 1..17: note = 1D10-4.83967[CD28]_H1L1 vhCDR2
RINSDGSTASHADSVRD

SEQ ID NO: 156 - protein, 11 aa, synthetic construct
  source 1..11: note = 1D10-4.83967[CD28]_H1L1 vhCDR3
ADNTTWYEFDF

SEQ ID NO: 157 - protein, 107 aa, synthetic construct
  source 1..107: note = 1D10-4.83967[CD28]_H1L1 Variable light (vl) domain
EIVLTQSPATLSLSPGERATLSCRASQSISIYLAWYQQKPGQAPRLLIFDASKRATGIPARFSGSGSGTDFTLTISSLEPEDFAVYSCQQRHNWPPTFGQGTKVEIK

SEQ ID NO: 158 - protein, 11 aa, synthetic construct
  source 1..11: note = 1D10-4.83967[CD28]_H1L1 vlCDR1
RASQSISIYLA

SEQ ID NO: 159 - protein, 7 aa, synthetic construct
  source 1..7: note = 1D10-4.83967[CD28]_H1L1 vlCDR2
DASKRAT

SEQ ID NO: 160 - protein, 9 aa, synthetic construct
  source 1..9: note = 1D10-4.83967[CD28]_H1L1 vlCDR3
QQRHNWPPT

SEQ ID NO: 161 - protein, 124 aa, synthetic construct
  source 1..124: note = 1A12.83967[CD28]_H1L1 Variable heavy (vh) domain
EVQLVESGGGVVQPGGSLRLSCAASGFTFDDYAMHWVRQGPGKGLEWVSLINGDGDNTYYADSVKGRFTISRDNSKNSLYLQMNSLRTEDTALYFCAKDPLKAVSYYYYGMDVWGQGTTVTVSS

SEQ ID NO: 162 - protein, 5 aa, synthetic construct
  source 1..5: note = 1A12.83967[CD28]_H1L1 vhCDR1
DYAMH

SEQ ID NO: 163 - protein, 17 aa, synthetic construct
  source 1..17: note = 1A12.83967[CD28]_H1L1 vhCDR2
LINGDGDNTYYADSVKG

SEQ ID NO: 164 - protein, 15 aa, synthetic construct
  source 1..15: note = 1A12.83967[CD28]_H1L1 vhCDR3
DPLKAVSYYYYGMDV

SEQ ID NO: 165 - protein, 107 aa, synthetic construct
  source 1..107: note = 1A12.83967[CD28]_H1L1 Variable light (vl) domain
EIVLTQSPATLSFSPGERATLSCRASQTITNYLAWYQQKPGQAPRLLIYDASNRATGIPARFSGRGSGTDFTLTISGLEPEDFAVYYCQQRSSWPPTFGQGTKVEIK

SEQ ID NO: 166 - protein, 11 aa, synthetic construct
  source 1..11: note = 1A12.83967[CD28]_H1L1 vlCDR1
RASQTITNYLA

SEQ ID NO: 167 - protein, 7 aa, synthetic construct
  source 1..7: note = 1A12.83967[CD28]_H1L1 vlCDR2
DASNRAT

SEQ ID NO: 168 - protein, 9 aa, synthetic construct
  source 1..9: note = 1A12.83967[CD28]_H1L1 vlCDR3
QQRSSWPPT

SEQ ID NO: 169 - protein, 125 aa, synthetic construct
  source 1..125: note = 1B11.83967[CD28]_H1L1 Variable heavy (vh) domain
EVQLVESGGGLVQPGGSLRLSCAASGFTVSSNFMSWFRQAPGKGLEWVSVIYSGGSTYYADSVKGRFTISRHNSKNTLYLQMNSLRSEDTAVYYCARHGITGTTGDYYYYGMDVWGQGTTVTVSS

SEQ ID NO: 170 - protein, 5 aa, synthetic construct
  source 1..5: note = 1B11.83967[CD28]_H1L1 vhCDR1
SNFMS

SEQ ID NO: 171 - protein, 16 aa, synthetic construct
  source 1..16: note = 1B11.83967[CD28]_H1L1 vhCDR2
VIYSGGSTYYADSVKG

SEQ ID NO: 172 - protein, 17 aa, synthetic construct
  source 1..17: note = 1B11.83967[CD28]_H1L1 vhCDR3
HGITGTTGDYYYYGMDV

SEQ ID NO: 173 - protein, 107 aa, synthetic construct
  source 1..107: note = 1B11.83967[CD28]_H1L1 Variable light (vl) domain
EIVLTQSPATLSLSPGERATLSCRASQSVRSYLAWYQQKPGQAPRLLIYDASNRATGIPARFSGSGSGTDFTLTISSLEPEDFAVYYCQQRSNWPPTFGQGTKVEIK

SEQ ID NO: 174 - protein, 11 aa, synthetic construct
  source 1..11: note = 1B11.83967[CD28]_H1L1 vlCDR1
RASQSVRSYLA

SEQ ID NO: 175 - protein, 7 aa, synthetic construct
  source 1..7: note = 1B11.83967[CD28]_H1L1 vlCDR2
DASNRAT

SEQ ID NO: 176 - protein, 9 aa, synthetic construct
  source 1..9: note = 1B11.83967[CD28]_H1L1 vlCDR3
QQRSNWPPT

SEQ ID NO: 177 - protein, 120 aa, synthetic construct
  source 1..120: note = 1D10-2.83967[CD28]_H1L1 Variable heavy (vh) domain
EVQLVESGGGLVQPGGSLRLSCAASGFTFSDYWMHWVRQPPGKGLMWVSRINSDGSTASHADSVRDRFSISRDNAKNTLYLQLNGLRAEDTAVYYCARADSTTWYEFDFWGQGALVTVSS

SEQ ID NO: 178 - protein, 5 aa, synthetic construct
  source 1..5: note = 1D10-2.83967[CD28]_H1L1 vhCDR1
DYWMH

SEQ ID NO: 179 - protein, 17 aa, synthetic construct
  source 1..17: note = 1D10-2.83967[CD28]_H1L1 vhCDR2
RINSDGSTASHADSVRD

SEQ ID NO: 180 - protein, 11 aa, synthetic construct
  source 1..11: note = 1D10-2.83967[CD28]_H1L1 vhCDR3
ADSTTWYEFDF

SEQ ID NO: 181 - protein, 107 aa, synthetic construct; identical to SEQ ID NO: 157
  source 1..107: note = 1D10-2.83967[CD28]_H1L1 Variable light (vl) domain

SEQ ID NO: 182 - protein, 11 aa, synthetic construct
  source 1..11: note = 1D10-2.83967[CD28]_H1L1 vlCDR1
RASQSISIYLA

SEQ ID NO: 183 - protein, 7 aa, synthetic construct
  source 1..7: note = 1D10-2.83967[CD28]_H1L1 vlCDR2
DASKRAT

SEQ ID NO: 184 - protein, 9 aa, synthetic construct
  source 1..9: note = 1D10-2.83967[CD28]_H1L1 vlCDR3
QQRHNWPPT

SEQ ID NO: 185 - protein, 120 aa, synthetic construct
  source 1..120: note = 1D7.83967[CD28]_H1L1 Variable heavy (vh) domain
EVQLVESGGGLVQPGGSLRLSCAASGFTFSSYWMHWVRQAPGKGLMWVSRINSDGSSASHAESVRGRFTISRDNAKNTLYLQLNGLRAEDTAVYYCARADSSTWYEFDFWGQGALVTVSS

SEQ ID NO: 186 - protein, 5 aa, synthetic construct
  source 1..5: note = 1D7.83967[CD28]_H1L1 vhCDR1
SYWMH

SEQ ID NO: 187 - protein, 17 aa, synthetic construct
  source 1..17: note = 1D7.83967[CD28]_H1L1 vhCDR2
RINSDGSSASHAESVRG

SEQ ID NO: 188 - protein, 11 aa, synthetic construct
  source 1..11: note = 1D7.83967[CD28]_H1L1 vhCDR3
ADSSTWYEFDF

SEQ ID NO: 189 - protein, 107 aa, synthetic construct
  source 1..107: note = 1D7.83967[CD28]_H1L1 Variable light (vl) domain
EIVLTQSPATLSLSPGERATLSCRASQSVSSYLAWYQQKPGQAPRLLIYDASKRATGIPARFSGSGSGTDFTLTISSLEPEDFAVYYCQQRNNWPPTFGQGTKVEIK

SEQ ID NO: 190 - protein, 11 aa, synthetic construct
  source 1..11: note = 1D7.83967[CD28]_H1L1 vlCDR1
RASQSVSSYLA

SEQ ID NO: 191 - protein, 7 aa, synthetic construct
  source 1..7: note = 1D7.83967[CD28]_H1L1 vlCDR2
DASKRAT

SEQ ID NO: 192 - protein, 9 aa, synthetic construct
  source 1..9: note = 1D7.83967[CD28]_H1L1 vlCDR3
QQRNNWPPT

SEQ ID NO: 193 - protein, 121 aa, synthetic construct
  source 1..121: note = 1D3.83967[CD28]_H1L1 Variable heavy (vh) domain
QVQLQESGPGLVKPSQTLSLTCTVSGGSISSGGYYWSWIRQHPGKGLEWIGFIYYSWSTSYNPSLKSRLTMSLDTSKNQFSLKLSSVTAADTAVYYCAREANVNDAAFDIWGPGTMVTVSS

SEQ ID NO: 194 - protein, 7 aa, synthetic construct
  source 1..7: note = 1D3.83967[CD28]_H1L1 vhCDR1
SGGYYWS

SEQ ID NO: 195 - protein, 16 aa, synthetic construct
  source 1..16: note = 1D3.83967[CD28]_H1L1 vhCDR2
FIYYSWSTSYNPSLKS

SEQ ID NO: 196 - protein, 11 aa, synthetic construct
  source 1..11: note = 1D3.83967[CD28]_H1L1 vhCDR3
EANVNDAAFDI

SEQ ID NO: 197 - protein, 107 aa, synthetic construct [sequence omitted]

SEQ ID NO: 198 - protein, 11 aa, synthetic construct
  source 1..11: note = 1D3.83967[CD28]_H1L1 vlCDR1
RASQSVSSYLA

SEQ ID NO: 199 - protein, 7 aa, synthetic construct
  source 1..7: note = 1D3.83967[CD28]_H1L1 vlCDR2
DASNRAT

SEQ ID NO: 200 - protein, 9 aa, synthetic construct
  source 1..9: note = 1D3.83967[CD28]_H1L1 vlCDR3
QQRSNWPPT

SEQ ID NO: 201 - protein, 119 aa, synthetic construct
  source 1..119: note = 2B10.88497[CD28]_H1L1 Variable heavy (vh) domain
EVQLVESGGGLVKPGGSLRLSCAASGFTFSSYTMNWVRQAPGKGLEWVSSISSSSSHKYYSDSVKGRFTISRDNAKNSLYLQMNSLRAEDTAEYYCAREGDIVLIFDPWGQGTLVTVSS

SEQ ID NO: 202 - protein, 5 aa, synthetic construct
  source 1..5: note = 2B10.88497[CD28]_H1L1 vhCDR1
SYTMN

SEQ ID NO: 203 - protein, 17 aa, synthetic construct
  source 1..17: note = 2B10.88497[CD28]_H1L1 vhCDR2
SISSSSSHKYYSDSVKG

SEQ ID NO: 204 - protein, 10 aa, synthetic construct
  source 1..10: note = 2B10.88497[CD28]_H1L1 vhCDR3
EGDIVLIFDP

SEQ ID NO: 205 - protein, 107 aa, synthetic construct
  source 1..107: note = 2B10.88497[CD28]_H1L1 Variable light (vl) domain
EIVLTQSPATLSLSPGERATLSCRASQSVSSYLAWYQQNPGQVPRLLIYDASNRATGIPVRFSGSGSGTDFTLTISSLEPEDFAVYYCQQRGNWPPTFGQGTKVEIK

SEQ ID NO: 206 - protein, 11 aa, synthetic construct
  source 1..11: note = 2B10.88497[CD28]_H1L1 vlCDR1
RASQSVSSYLA

SEQ ID NO: 207 - protein, 7 aa, synthetic construct
  source 1..7: note = 2B10.88497[CD28]_H1L1 vlCDR2
DASNRAT

SEQ ID NO: 208 - protein, 9 aa, synthetic construct
  source 1..9: note = 2B10.88497[CD28]_H1L1 vlCDR3
QQRGNWPPT

SEQ ID NO: 209 - protein, 119 aa, synthetic construct
  source 1..119: note = 2B9.88497[CD28]_H1L1 Variable heavy (vh) domain
EVQLVESGGGLVKPGGSLRLSCAASGFTFSSYTMNWVRQAPGKGLEWVSSISSSNTYIYYIDSVKGRFTISRDNAKNSLYLQMNSLRAEDTAEYYCVREGDIVLTFDPWGQGTLVTVSS

SEQ ID NO: 210 - protein, 5 aa, synthetic construct
  source 1..5: note = 2B9.88497[CD28]_H1L1 vhCDR1
SYTMN

SEQ ID NO: 211 - protein, 17 aa, synthetic construct
  source 1..17: note = 2B9.88497[CD28]_H1L1 vhCDR2
SISSSNTYIYYIDSVKG

SEQ ID NO: 212 - protein, 10 aa, synthetic construct
  source 1..10: note = 2B9.88497[CD28]_H1L1 vhCDR3
EGDIVLTFDP

SEQ ID NO: 213 - protein, 107 aa, synthetic construct
  source 1..107: note = 2B9.88497[CD28]_H1L1 Variable light (vl) domain
EIVLTQSPATLSLSPGERATLSCRASQSVSSYLAWFQQKPGQAPRLLIYDASNRATGIPARFSGSGSGTDFTLTISSLEPEDFAVYYCQQRGSWPPTFGQGTKVEIK

SEQ ID NO: 214 - protein, 11 aa, synthetic construct
  source 1..11: note = 2B9.88497[CD28]_H1L1 vlCDR1
RASQSVSSYLA

SEQ ID NO: 215 - protein, 7 aa, synthetic construct
  source 1..7: note = 2B9.88497[CD28]_H1L1 vlCDR2
DASNRAT

SEQ ID NO: 216 - protein, 9 aa, synthetic construct
  source 1..9: note = 2B9.88497[CD28]_H1L1 vlCDR3
QQRGSWPPT

SEQ ID NO: 217 - protein, 120 aa, synthetic construct
  source 1..120: note = 2B8.88497[CD28]_H1L1 Variable heavy (vh) domain
EVQLVETGGGLVQPGESLRLSCAASGFSFSSNWMHWVRQAPGKGLVWISRINSDGSSASSADSVRGRFTISRDNAKNTLYLQMNSLRAEDTAVYYCARSDSSSWYEFEYWGQGTLVTVSS

SEQ ID NO: 218 - protein, 5 aa, synthetic construct
  source 1..5: note = 2B8.88497[CD28]_H1L1 vhCDR1
SNWMH

SEQ ID NO: 219 - protein, 17 aa, synthetic construct
  source 1..17: note = 2B8.88497[CD28]_H1L1 vhCDR2
RINSDGSSASSADSVRG

SEQ ID NO: 220 - protein, 11 aa, synthetic construct
  source 1..11: note = 2B8.88497[CD28]_H1L1 vhCDR3
SDSSSWYEFEY

SEQ ID NO: 221 - protein, 107 aa, synthetic construct
  source 1..107: note = 2B8.88497[CD28]_H1L1 Variable light (vl) domain
EIVLTQSPATLSLSPGERATLSCRASQSVSNYLAWYQQKPGQAPRLLIYDTSNRATGIPARFSGSGSGTDFTLTISSLEPEDFAVYYCQQRGNWPPTFGQGTKVEIK

SEQ ID NO: 222 - protein, 11 aa, synthetic construct
  source 1..11: note = 2B8.88497[CD28]_H1L1 vlCDR1
RASQSVSNYLA

SEQ ID NO: 223 - protein, 7 aa, synthetic construct
  source 1..7: note = 2B8.88497[CD28]_H1L1 vlCDR2
DTSNRAT

SEQ ID NO: 224 - protein, 9 aa, synthetic construct
  source 1..9: note = 2B8.88497[CD28]_H1L1 vlCDR3
QQRGNWPPT

SEQ ID NO: 225 - protein, 120 aa, synthetic construct
  source 1..120: note = 1G6-1.83967[CD28]_H1L1 Variable heavy (vh) domain
EVQLVESGGGLVQPGGSLRLSCAASGFTFSSYWMHWVRQAPGKGLVWVSRINSDGSSASHADSVKGRFTISRDNAKNTLYLQVNGLRAEDTAVYYCARADSSSWYEFDFWGQGTLVTVSS

SEQ ID NO: 226 - protein, 5 aa, synthetic construct
  source 1..5: note = 1G6-1.83967[CD28]_H1L1 vhCDR1
SYWMH

SEQ ID NO: 227 - protein, 17 aa, synthetic construct
  source 1..17: note = 1G6-1.83967[CD28]_H1L1 vhCDR2
RINSDGSSASHADSVKG

SEQ ID NO: 228 - protein, 11 aa, synthetic construct
  source 1..11: note = 1G6-1.83967[CD28]_H1L1 vhCDR3
ADSSSWYEFDF

SEQ ID NO: 229 - protein, 107 aa, synthetic construct; identical to SEQ ID NO: 109
  source 1..107: note = 1G6-1.83967[CD28]_H1L1 Variable light (vl) domain

SEQ ID NO: 230 - protein, 11 aa, synthetic construct
  source 1..11: note = 1G6-1.83967[CD28]_H1L1 vlCDR1
RASQSVSSYLA

SEQ ID NO: 231 - protein, 7 aa, synthetic construct
  source 1..7: note = 1G6-1.83967[CD28]_H1L1 vlCDR2
DASNRAT

SEQ ID NO: 232 - protein, 9 aa, synthetic construct
  source 1..9: note = 1G6-1.83967[CD28]_H1L1 vlCDR3
QQRNNWPPT

SEQ ID NO: 233 - protein, 120 aa, synthetic construct
  source 1..120: note = 1C7.88474[CD28]_H1L1 Variable heavy (vh) domain
EVQLVESGGGLVQPGGSLRLSCAASGFTFSTYWMHWVRQTPGKGLVWVSRINSDGSSASFADSVRGRFTISRDNAKNTLYLYMNSLRAEDTAIYYCARADSSTWSHFDYWGQGTLVTVSS

SEQ ID NO: 234 - protein, 5 aa, synthetic construct
  source 1..5: note = 1C7.88474[CD28]_H1L1 vhCDR1
TYWMH

SEQ ID NO: 235 - protein, 17 aa, synthetic construct
  source 1..17: note = 1C7.88474[CD28]_H1L1 vhCDR2
RINSDGSSASFADSVRG

SEQ ID NO: 236 - protein, 11 aa, synthetic construct
  source 1..11: note = 1C7.88474[CD28]_H1L1 vhCDR3
ADSSTWSHFDY

SEQ ID NO: 237 - protein, 107 aa, synthetic construct
  source 1..107: note = 1C7.88474[CD28]_H1L1 Variable light (vl) domain
EIVLTQSPATLSLSPGEGATLSCRASQSVSSYLAWFQQKRGQAPRLLIYDASNRATGIPARFSGSGSGTDFTLTISSLEPEDFAVYYCQQRSNWPPTFGQGTKVEIK

SEQ ID NO: 238 - protein, 11 aa, synthetic construct
  source 1..11: note = 1C7.88474[CD28]_H1L1 vlCDR1
RASQSVSSYLA

SEQ ID NO: 239 - protein, 7 aa, synthetic construct
  source 1..7: note = 1C7.88474[CD28]_H1L1 vlCDR2
DASNRAT

SEQ ID NO: 240 - protein, 9 aa, synthetic construct
  source 1..9: note = 1C7.88474[CD28]_H1L1 vlCDR3
QQRSNWPPT

SEQ ID NO: 241 - protein, 124 aa, synthetic construct
  source 1..124: note = 1A5-2.88474[CD28]_H1L1 Variable heavy (vh) domain
EVHLVESGGDLVQPGGSLRLSCAASGFTVSSNFMSWFRQAPGKGLEWVSVIYSGGSTNYADSVKGRFTISRHNSKNTLYLQMNSLRVEDTAVYYCARHGIAGTTPYFYYGMDVWGQGTTVTVSS

SEQ ID NO: 242 - protein, 5 aa, synthetic construct
  source 1..5: note = 1A5-2.88474[CD28]_H1L1 vhCDR1
SNFMS

SEQ ID NO: 243 - protein, 16 aa, synthetic construct
  source 1..16: note = 1A5-2.88474[CD28]_H1L1 vhCDR2
VIYSGGSTNYADSVKG

SEQ ID NO: 244 - protein, 16 aa, synthetic construct
  source 1..16: note = 1A5-2.88474[CD28]_H1L1 vhCDR3
HGIAGTTPYFYYGMDV

SEQ ID NO: 245 - protein, 107 aa, synthetic construct
  source 1..107: note = 1A5-2.88474[CD28]_H1L1 Variable light (vl) domain
EIVLTQSPATLSLSPGEGATLSCRASQSVSNYLAWYQQKPGQAPRLLIYDASNRATGIPARFSGSGSGTDFTLTISSLEPEDFVVYYCQQRSNWPPTFGQGTKVEIK

SEQ ID NO: 246 - protein, 11 aa, synthetic construct
  source 1..11: note = 1A5-2.88474[CD28]_H1L1 vlCDR1
RASQSVSNYLA

SEQ ID NO: 247 - protein, 7 aa, synthetic construct
  source 1..7: note = 1A5-2.88474[CD28]_H1L1 vlCDR2
DASNRAT

SEQ ID NO: 248 - protein, 9 aa, synthetic construct
  source 1..9: note = 1A5-2.88474[CD28]_H1L1 vlCDR3
QQRSNWPPT

SEQ ID NO: 249 - protein, 122 aa, synthetic construct
  source 1..122: note = 1A2.88474[CD28]_H1L1 Variable heavy (vh) domain
EVQLVESGGGLVQPGGSLRLSCAASGFTFSNFWMHWVRQAPGKGLVWVSRINSDGSSASFADSVKGRFTISRDNAKNTLYLQMNSLRAEDTAVYYCARDRYSGSFYNWFDPWGQGTLVTVSS

SEQ ID NO: 250 - protein, 5 aa, synthetic construct
  source 1..5: note = 1A2.88474[CD28]_H1L1 vhCDR1
NFWMH

SEQ ID NO: 251 - protein, 17 aa, synthetic construct
  source 1..17: note = 1A2.88474[CD28]_H1L1 vhCDR2
RINSDGSSASFADSVKG

SEQ ID NO: 252 - protein, 13 aa, synthetic construct
  source 1..13: note = 1A2.88474[CD28]_H1L1 vhCDR3
DRYSGSFYNWFDP

SEQ ID NO: 253 - protein, 107 aa, synthetic construct [sequence omitted]

SEQ ID NO: 254 - protein, 11 aa, synthetic construct
  source 1..11: note = 1A2.88474[CD28]_H1L1 vlCDR1
RASQSVSSYLA

SEQ ID NO: 255 - protein, 7 aa, synthetic construct
  source 1..7: note = 1A2.88474[CD28]_H1L1 vlCDR2
DASNRAT

SEQ ID NO: 256 - protein, 9 aa, synthetic construct
  source 1..9: note = 1A2.88474[CD28]_H1L1 vlCDR3
QQRSNWPPT

SEQ ID NO: 257 - protein, 120 aa, synthetic construct
  source 1..120: note = 2F5.88497[CD28]_H1L1 Variable heavy (vh) domain
EVQLVESGGGLVQPGGSLRLSCAASGFTFSSYWIHWVRQTPGKGLVWVSRINSDGSSASHADSVRGRFTISRHNAKNTLYLQMNSLRAEDTAVYYCTRSDSSTWYKFDYWGQGTLVTVSS

SEQ ID NO: 258 - protein, 5 aa, synthetic construct
  source 1..5: note = 2F5.88497[CD28]_H1L1 vhCDR1
SYWIH

SEQ ID NO: 259 - protein, 17 aa, synthetic construct
  source 1..17: note = 2F5.88497[CD28]_H1L1 vhCDR2
RINSDGSSASHADSVRG

SEQ ID NO: 260 - protein, 11 aa, synthetic construct
  source 1..11: note = 2F5.88497[CD28]_H1L1 vhCDR3
SDSSTWYKFDY

SEQ ID NO: 261 - protein, 107 aa, synthetic construct [sequence omitted]

SEQ ID NO: 262 - protein, 11 aa, synthetic construct
  source 1..11: note = 2F5.88497[CD28]_H1L1 vlCDR1
RASQSVSSYLA

SEQ ID NO: 263 - protein, 7 aa, synthetic construct
  source 1..7: note = 2F5.88497[CD28]_H1L1 vlCDR2
DASNRAT

SEQ ID NO: 264 - protein, 9 aa, synthetic construct
  source 1..9: note = 2F5.88497[CD28]_H1L1 vlCDR3
QQRSNWPPT

SEQ ID NO: 265 - protein, 125 aa, synthetic construct
  source 1..125: note = 2E9.88497[CD28]_H1L1 Variable heavy (vh) domain
EVQLVEYGGGLVQPGGSLRLSCAASGFTVSSSYMSWVRQAPGKGLEWVSVIYSGGYTYYADSVKGRFIISRDNSKNTLYLQMNSLSAEDTAVYHCSRHGITGTAGYYHYYGMDVWGQGTTVTVSS

SEQ ID NO: 266 - protein, 5 aa, synthetic construct
  source 1..5: note = 2E9.88497[CD28]_H1L1 vhCDR1
SSYMS

SEQ ID NO: 267 - protein, 16 aa, synthetic construct
  source 1..16: note = 2E9.88497[CD28]_H1L1 vhCDR2
VIYSGGYTYYADSVKG

SEQ ID NO: 268 - protein, 17 aa, synthetic construct
  source 1..17: note = 2E9.88497[CD28]_H1L1 vhCDR3
HGITGTAGYYHYYGMDV

SEQ ID NO: 269 - protein, 107 aa, synthetic construct
  source 1..107: note = 2E9.88497[CD28]_H1L1 Variable light (vl) domain
EIVLTQSPATLSLSPGERATLSCRASQSVSSYLAWYQQRPGQAPRLLIYEGSNRATGIPARFSGSGSGTDFTLTISSLEPEDFAVYYCQQRSNWPPTFGQGTKVEIK

SEQ ID NO: 270 - protein, 11 aa, synthetic construct
  source 1..11: note = 2E9.88497[CD28]_H1L1 vlCDR1
RASQSVSSYLA

SEQ ID NO: 271 - protein, 7 aa, synthetic construct
  source 1..7: note = 2E9.88497[CD28]_H1L1 vlCDR2
EGSNRAT

SEQ ID NO: 272 - protein, 9 aa, synthetic construct
  source 1..9: note = 2E9.88497[CD28]_H1L1 vlCDR3
QQRSNWPPT

SEQ ID NO: 273 - protein, 120 aa, synthetic construct
  source 1..120: note = 1A3.88474[CD28]_H1L1 Variable heavy (vh) domain
EVQLVESGGGLVQPGGSLRLSCAAFGFTFSNYWMHWVRQAPGKGLVWVSRINSDGSSASFADSVRGRFTISRDNAKNTLYLQLNSLRAEDTAVYYCARADSSSWYLFDNWGQGTLVTVSS

SEQ ID NO: 274 - protein, 5 aa, synthetic construct
  source 1..5: note = 1A3.88474[CD28]_H1L1 vhCDR1
NYWMH

SEQ ID NO: 275 - protein, 17 aa, synthetic construct
  source 1..17: note = 1A3.88474[CD28]_H1L1 vhCDR2
RINSDGSSASFADSVRG

SEQ ID NO: 276 - protein, 11 aa, synthetic construct
  source 1..11: note = 1A3.88474[CD28]_H1L1 vhCDR3
ADSSSWYLFDN

SEQ ID NO: 277 - protein, 107 aa, synthetic construct [sequence omitted]

SEQ ID NO: 278 - protein, 11 aa, synthetic construct
  source 1..11: note = 1A3.88474[CD28]_H1L1 vlCDR1
RASQSVSSYLA

SEQ ID NO: 279 - protein, 7 aa, synthetic construct
  source 1..7: note = 1A3.88474[CD28]_H1L1 vlCDR2
DASNRAT

SEQ ID NO: 280 - protein, 9 aa, synthetic construct
  source 1..9: note = 1A3.88474[CD28]_H1L1 vlCDR3
QQRSNWPPT

SEQ ID NO: 281 - protein, 120 aa, synthetic construct
  source 1..120: note = 1H11.88474[CD28]_H1L1 Variable heavy (vh) domain
EVQLVESGGGLVQPGGSLRLSCAASGFTFSSYWMHWVRQAPGKGLVWVSRINNDGSSASFADSVRGRFTISRDNAKNTLSLQMNSLRAEDTAVYYCARADSSSWYHFDYWGQGTLVTVSS

SEQ ID NO: 282 - protein, 5 aa, synthetic construct
  source 1..5: note = 1H11.88474[CD28]_H1L1 vhCDR1
SYWMH

SEQ ID NO: 283 - protein, 17 aa, synthetic construct
  source 1..17: note = 1H11.88474[CD28]_H1L1 vhCDR2
RINNDGSSASFADSVRG

SEQ ID NO: 284 - protein, 11 aa, synthetic construct
  source 1..11: note = 1H11.88474[CD28]_H1L1 vhCDR3
ADSSSWYHFDY

SEQ ID NO: 285 - protein, 107 aa, synthetic construct
  source 1..107: note = 1H11.88474[CD28]_H1L1 Variable light (vl) domain
EIVLTQSPATLSLSPGERATLSCRASQSVSSYLAWYQQKPGQAPRLLIFDASNRATGIPARFSGSGSGTDFTLTISSLEPEDFAVYYCQQRSNWPPTFGQGTKVEIK

SEQ ID NO: 286 - protein, 11 aa, synthetic construct
  source 1..11: note = 1H11.88474[CD28]_H1L1 vlCDR1
RASQSVSSYLA

SEQ ID NO: 287 - protein, 7 aa, synthetic construct
  source 1..7: note = 1H11.88474[CD28]_H1L1 vlCDR2
DASNRAT

SEQ ID NO: 288 - protein, 9 aa, synthetic construct
  source 1..9: note = 1H11.88474[CD28]_H1L1 vlCDR3
QQRSNWPPT

SEQ ID NO: 289 - protein, 120 aa, synthetic construct
  source 1..120: note = 1G1-1.88474[CD28]_H1L1 Variable heavy (vh) domain
EVQLVESGGGLVQPGGSLRLSCAASGFTFSSYWMHWVRQAPGKGLVWVSRVNSDGSSASFADSVKGRFTISRDNAKNTLYLQMNSLRAEDTAVYYCARADNSSWYHFDYWGQGTLVTVSS

SEQ ID NO: 290 - protein, 5 aa, synthetic construct
  source 1..5: note = 1G1-1.88474[CD28]_H1L1 vhCDR1
SYWMH

SEQ ID NO: 291 - protein, 17 aa, synthetic construct
  source 1..17: note = 1G1-1.88474[CD28]_H1L1 vhCDR2
RVNSDGSSASFADSVKG

SEQ ID NO: 292 - protein, 11 aa, synthetic construct
  source 1..11: note = 1G1-1.88474[CD28]_H1L1 vhCDR3
ADNSSWYHFDY

SEQ ID NO: 293 - protein, 107 aa, synthetic construct
  source 1..107: note = 1G1-1.88474[CD28]_H1L1 Variable light (vl) domain
EIVLTQSPATLSLSPGERATLSCRASQSVSSYLAWYQQKPGQAPRLLIYDASNRATAIPARFSGSGSGTDFTLTISSLEPEDFAVYYCQQRRNWPPTFGQGTKVEIK

SEQ ID NO: 294 - protein, 11 aa, synthetic construct
  source 1..11: note = 1G1-1.88474[CD28]_H1L1 vlCDR1
RASQSVSSYLA

SEQ ID NO: 295 - protein, 7 aa, synthetic construct
  source 1..7: note = 1G1-1.88474[CD28]_H1L1 vlCDR2
DASNRAT

SEQ ID NO: 296 - protein, 9 aa, synthetic construct
  source 1..9: note = 1G1-1.88474[CD28]_H1L1 vlCDR3
QQRRNWPPT

SEQ ID NO: 297 - protein, 122 aa, synthetic construct
  source 1..122: note = 1E6-1.88474[CD28]_H1L1 Variable heavy (vh) domain
QVQLQESGPGLVKPSGTLSLTCAVSGDSISSGNWWSWVRQPPGKGLEWIGEIYHSGSSNYNPSLKSRVTISVDKSKNQFSLKLNTVTAADTAVYYCAREGLGSYYYYGMDVWGQGTTVTVSS

SEQ ID NO: 298 - protein, 6 aa, synthetic construct
  source 1..6: note = 1E6-1.88474[CD28]_H1L1 vhCDR1
SGNWWS

SEQ ID NO: 299 - protein, 16 aa, synthetic construct
  source 1..16: note = 1E6-1.88474[CD28]_H1L1 vhCDR2
EIYHSGSSNYNPSLKS

SEQ ID NO: 300 - protein, 13 aa, synthetic construct
  source 1..13: note = 1E6-1.88474[CD28]_H1L1 vhCDR3
EGLGSYYYYGMDV

SEQ ID NO: 301 - protein, 107 aa, synthetic construct [sequence omitted]

SEQ ID NO: 302 - protein, 11 aa, synthetic construct
  source 1..11: note = 1E6-1.88474[CD28]_H1L1 vlCDR1
RASQSVSSYLA

SEQ ID NO: 303 - protein, 7 aa, synthetic construct
  source 1..7: note = 1E6-1.88474[CD28]_H1L1 vlCDR2
DASNRAT

SEQ ID NO: 304 - protein, 9 aa, synthetic construct
  source 1..9: note = 1E6-1.88474[CD28]_H1L1 vlCDR3
QQRSNWPPT

SEQ ID NO: 305 - protein, 115 aa, synthetic construct
  source 1..115: note = 1A1-5.88488[CD28]_H1L1 Variable heavy (vh) domain
EVQLVESGGGLVHPGGSLRLSCAASGFSFITYEMNWVRQAPGKGLEWVSYISSSGSAIYYADSVKGRFTISRDNVKNSLYLQMNSLRAEDTAVYYCARGAVVDYWGQGIWVTVSS

SEQ ID NO: 306 - protein, 5 aa, synthetic construct
  source 1..5: note = 1A1-5.88488[CD28]_H1L1 vhCDR1
TYEMN

SEQ ID NO: 307 - protein, 17 aa, synthetic construct
  source 1..17: note = 1A1-5.88488[CD28]_H1L1 vhCDR2
YISSSGSAIYYADSVKG

SEQ ID NO: 308 - protein, 6 aa, synthetic construct
  source 1..6: note = 1A1-5.88488[CD28]_H1L1 vhCDR3
GAVVDY

SEQ ID NO: 309 - protein, 107 aa, synthetic construct [sequence omitted]

SEQ ID NO: 310 - protein, 11 aa, synthetic construct
  source 1..11: note = 1A1-5.88488[CD28]_H1L1 vlCDR1
RASQSVSSYLA

SEQ ID NO: 311 - protein, 7 aa, synthetic construct
  source 1..7: note = 1A1-5.88488[CD28]_H1L1 vlCDR2
DASNRAT

SEQ ID NO: 312 - protein, 9 aa, synthetic construct
  source 1..9: note = 1A1-5.88488[CD28]_H1L1 vlCDR3
QQRSNWPPT

SEQ ID NO: 313 - protein, 125 aa, synthetic construct
  source 1..125: note = 1E2-5.88488[CD28]_H1L1 Variable heavy (vh) domain
EVQLEESGGGLVQPGGSLRLSCAASGFTVSSNFMSWFRQAPGKGLEWVSVIYSGGSINHADSVKGRFTTSKHNSKNTVYLQMNSLRSEDTAVYYCARHGITGTTGDYHYYGMDVWGQGTTVTVSS

SEQ ID NO: 314 - protein, 5 aa, synthetic construct
  source 1..5: note = 1E2-5.88488[CD28]_H1L1 vhCDR1
SNFMS

SEQ ID NO: 315 - protein, 16 aa, synthetic construct
  source 1..16: note = 1E2-5.88488[CD28]_H1L1 vhCDR2
VIYSGGSINHADSVKG

SEQ ID NO: 316 - protein, 17 aa, synthetic construct
  source 1..17: note = 1E2-5.88488[CD28]_H1L1 vhCDR3
HGITGTTGDYHYYGMDV

SEQ ID NO: 317 - protein, 107 aa, synthetic construct
  source 1..107: note = 1E2-5.88488[CD28]_H1L1 Variable light (vl) domain
EIVLTQSPATLSLSPGERATLSCRASQSVSSYLAWYQQKPGQAPRLLIYDASNRATGIPARFSGSGSGTDFTLTISSLEPEDFAIYYCQQRSNWPPTFGQGTKVEIK

SEQ ID NO: 318 - protein, 11 aa, synthetic construct
  source 1..11: note = 1E2-5.88488[CD28]_H1L1 vlCDR1
RASQSVSSYLA

SEQ ID NO: 319 - protein, 7 aa, synthetic construct
  source 1..7: note = 1E2-5.88488[CD28]_H1L1 vlCDR2
DASNRAT

SEQ ID NO: 320 - protein, 9 aa, synthetic construct
  source 1..9: note = 1E2-5.88488[CD28]_H1L1 vlCDR3
QQRSNWPPT

SEQ ID NO: 321 - protein, 125 aa, synthetic construct
  source 1..125: note = 2F6.88497[CD28]_H1L1 Variable heavy (vh) domain
EVQLVESGGGLVQPGGSLRLSCAASGFTVSSNYMSWFRQAPGKGVEWVSVIYSGGSTYYADSVKGRFIISRDNSKNTLYLQMNSLRAEDTAVYYCARHGITGSAGYYYYYGMDVWGQGTTVTVSS

SEQ ID NO: 322 - protein, 5 aa, synthetic construct
  source 1..5: note = 2F6.88497[CD28]_H1L1 vhCDR1
SNYMS

SEQ ID NO: 323 - protein, 16 aa, synthetic construct
  source 1..16: note = 2F6.88497[CD28]_H1L1 vhCDR2
VIYSGGSTYYADSVKG

SEQ ID NO: 324 - protein, 17 aa, synthetic construct
  source 1..17: note = 2F6.88497[CD28]_H1L1 vhCDR3
HGITGSAGYYYYYGMDV

SEQ ID NO: 325 - protein, 107 aa, synthetic construct
  source 1..107: note = 2F6.88497[CD28]_H1L1 Variable light (vl) domain
EIVLTQSPATLSLSPGERATLSCRASQSVSRYLAWYQQKPGQAPRLLIYDASNRATGIPARFSGSGSGTDFTLTISSLEPEDFAVYYCQQRSNWPPTFGQGTKVEIK

SEQ ID NO: 326 - protein, 11 aa, synthetic construct
  source 1..11: note = 2F6.88497[CD28]_H1L1 vlCDR1
RASQSVSRYLA

SEQ ID NO: 327 - protein, 7 aa, synthetic construct
  source 1..7: note = 2F6.88497[CD28]_H1L1 vlCDR2
DASNRAT

SEQ ID NO: 328 - protein, 9 aa, synthetic construct
  source 1..9: note = 2F6.88497[CD28]_H1L1 vlCDR3
QQRSNWPPT

SEQ ID NO: 329 - protein, 120 aa, synthetic construct
  source 1..120: note = 1H2.83967[CD28]_H1L1 Variable heavy (vh) domain
EVQLVESGGGLVQPGGSLRLSCAASGFTFSSYWMHWVRQAPGKGLVWVSRINSDGSSASHADSVKGRFTISRDNAKNTLYLQVNGLRAEDTAVYYCARADSSSWYKFDYWGQGTLVTVSS

SEQ ID NO: 330 - protein, 5 aa, synthetic construct
  source 1..5: note = 1H2.83967[CD28]_H1L1 vhCDR1
SYWMH

SEQ ID NO: 331 - protein, 17 aa, synthetic construct
  source 1..17: note = 1H2.83967[CD28]_H1L1 vhCDR2
RINSDGSSASHADSVKG

SEQ ID NO: 332 - protein, 11 aa, synthetic construct
  source 1..11: note = 1H2.83967[CD28]_H1L1 vhCDR3
ADSSSWYKFDY

SEQ ID NO: 333 - protein, 107 aa, synthetic construct; identical to SEQ ID NO: 173
  source 1..107: note = 1H2.83967[CD28]_H1L1 Variable light (vl) domain

SEQ ID NO: 334 - protein, 11 aa, synthetic construct
  source 1..11: note = 1H2.83967[CD28]_H1L1 vlCDR1
RASQSVRSYLA

SEQ ID NO: 335 - protein, 7 aa, synthetic construct
  source 1..7: note = 1H2.83967[CD28]_H1L1 vlCDR2
DASNRAT

SEQ ID NO: 336 - protein, 9 aa, synthetic construct
  source 1..9: note = 1H2.83967[CD28]_H1L1 vlCDR3
QQRSNWPPT

SEQ ID NO: 337 - protein, 122 aa, synthetic construct
  source 1..122: note = 1E4-3.83967[CD28]_H1L1 Variable heavy (vh) domain
EVQLVESGGGLVQPGGSLRLSCAASGFTFSSYWMHWVRQAPGKGLVWVSRINSDGSSASFADSVKGRFTISRDNAKNTLYLQMNSLRAEDTSVYYCAREGYSSSWYKYFHHWGQGTLVTVSS

SEQ ID NO: 338 - protein, 5 aa, synthetic construct
  source 1..5: note = 1E4-3.83967[CD28]_H1L1 vhCDR1
SYWMH

SEQ ID NO: 339 - protein, 17 aa, synthetic construct
  source 1..17: note = 1E4-3.83967[CD28]_H1L1 vhCDR2
RINSDGSSASFADSVKG

SEQ ID NO: 340 - protein, 13 aa, synthetic construct
  source 1..13: note = 1E4-3.83967[CD28]_H1L1 vhCDR3
EGYSSSWYKYFHH

SEQ ID NO: 341 - protein, 107 aa, synthetic construct
  source 1..107: note = 1E4-3.83967[CD28]_H1L1 Variable light (vl) domain
EIVLTQSPATLSLSPGERATLSCRASQSVSSYLAWYQQKPGQAPRLLIYDASNRATGIPARVSGSGSGTDFTLTISSLEPEDFAVYYCQQRSNWPPTFGQGTKVEIK

SEQ ID NO: 342 - protein, 11 aa, synthetic construct
  source 1..11: note = 1E4-3.83967[CD28]_H1L1 vlCDR1
RASQSVSSYLA

SEQ ID NO: 343 - protein, 7 aa, synthetic construct
  source 1..7: note = 1E4-3.83967[CD28]_H1L1 vlCDR2
DASNRAT

SEQ ID NO: 344 - protein, 9 aa, synthetic construct
  source 1..9: note = 1E4-3.83967[CD28]_H1L1 vlCDR3
QQRSNWPPT

SEQ ID NO: 345 - protein, 123 aa, synthetic construct
  source 1..123: note = 1C2-2.83967[CD28]_H1L1 Variable heavy (vh) domain
EVQLVESGGGLVQPGGSLRLSCVASGFTFSNYAMHWVRQAPGKGLKYISAISTSGSSIYYTNSVKDRFTISRDNSKNTLYLQMGSLTVEDMAVYYCAGGAASGHYFYYGMDVWGQGTTVTVSS

SEQ ID NO: 346 - protein, 5 aa, synthetic construct
  source 1..5: note = 1C2-2.83967[CD28]_H1L1 vhCDR1
NYAMH

SEQ ID NO: 347 - protein, 17 aa, synthetic construct
  source 1..17: note = 1C2-2.83967[CD28]_H1L1 vhCDR2
AISTSGSSIYYTNSVKD

SEQ ID NO: 348 - protein, 14 aa, synthetic construct
  source 1..14: note = 1C2-2.83967[CD28]_H1L1 vhCDR3
GAASGHYFYYGMDV

SEQ ID NO: 349 - protein, 107 aa, synthetic construct
  source 1..107: note = 1C2-2.83967[CD28]_H1L1 Variable light (vl) domain
EVVLTQSPATLSLSPGERVTLSCRASQSVTSYLAWYQQKPGQAPRLLIYDTSNRATGIPAKFSGSGSGTDFTLTISSLEPEDFAVYYCQQRYIWPPTFGQGAKVEIK

SEQ ID NO: 350 - protein, 11 aa, synthetic construct
  source 1..11: note = 1C2-2.83967[CD28]_H1L1 vlCDR1
RASQSVTSYLA

SEQ ID NO: 351 - protein, 7 aa, synthetic construct
  source 1..7: note = 1C2-2.83967[CD28]_H1L1 vlCDR2
DTSNRAT

SEQ ID NO: 352 - protein, 9 aa, synthetic construct
  source 1..9: note = 1C2-2.83967[CD28]_H1L1 vlCDR3
QQRYIWPPT

SEQ ID NO: 353 - protein, 124 aa, synthetic construct
  source 1..124: note = 1A11.83967[CD28]_H1L1 Variable heavy (vh) domain
EVQLVESGGGVVQPGGSLRLSCAASGFTFDDYAMHWVRQAPGKGLEWVSLISGDGGSTYYADSVKGRFTISRDNSKNSLYLQMNSLRTEDTALYYCAKDPLPASKYYYYGMDVWGQGTTVTVSS

SEQ ID NO: 354 - protein, 5 aa, synthetic construct
  source 1..5: note = 1A11.83967[CD28]_H1L1 vhCDR1
DYAMH

SEQ ID NO: 355 - protein, 17 aa, synthetic construct
  source 1..17: note = 1A11.83967[CD28]_H1L1 vhCDR2
LISGDGGSTYYADSVKG

SEQ ID NO: 356 - protein, 15 aa, synthetic construct
  source 1..15: note = 1A11.83967[CD28]_H1L1 vhCDR3
DPLPASKYYYYGMDV

SEQ ID NO: 357 - protein, 107 aa, synthetic construct
  source 1..107: note = 1A11.83967[CD28]_H1L1 Variable light (vl) domain
EIVLTQSPATLSLSPGERATLSCRASQSLSAYLAWYQQKPGQAPRLLIYDALNRATDIPARFRGSGSGTDFTLTISSLEPEDFAVYYCQQRSSWPPTFGQGTKVELK

SEQ ID NO: 358 - protein, 11 aa, synthetic construct
  source 1..11: note = 1A11.83967[CD28]_H1L1 vlCDR1
RASQSLSAYLA

SEQ ID NO: 359 - protein, 7 aa, synthetic construct
  source 1..7: note = 1A11.83967[CD28]_H1L1 vlCDR2
DALNRAT

SEQ ID NO: 360 - protein, 9 aa, synthetic construct
  source 1..9: note = 1A11.83967[CD28]_H1L1 vlCDR3
QQRSSWPPT

SEQ ID NO: 361-891 - skipped (531 entries)

SEQ ID NO: 892 - protein, 20 aa, synthetic construct
GKPGSGKPGSGKPGSGKPGS

SEQ ID NO: 893-935 - skipped (43 entries)

SEQ ID NO: 936 - protein, 15 aa, synthetic construct
EPKSCGKPGSGKPGS

SEQ ID NO: 937-1007 - skipped (71 entries)

SEQ ID NO: 1008 - protein, 118 aa, synthetic construct
  source 1..118: note = 2G4[PDL1]_H1L1 Variable heavy (vh) domain
EVQLLESGGGLVQPGGSLRLSCAASGFTFSSYDMSWVRQAPGKRLEWVSTISSGGSFTHYPDSVKGRFTISRDNSKNTLYLQMNSLRAEDTAVYYCVRRSGDWYFDVWGAGTTVTVSS

SEQ ID NO: 1009 - protein, 5 aa, synthetic construct
  source 1..5: note = 2G4[PDL1]_H1L1 vhCDR1
SYDMS

SEQ ID NO: 1010 - protein, 17 aa, synthetic construct
  source 1..17: note = 2G4[PDL1]_H1L1 vhCDR2
TISSGGSFTHYPDSVKG

SEQ ID NO: 1011 - protein, 9 aa, synthetic construct
  source 1..9: note = 2G4[PDL1]_H1L1 vhCDR3
RSGDWYFDV

SEQ ID NO: 1012 - protein, 109 aa, synthetic construct
  source 1..109: note = 2G4[PDL1]_H1L1 Variable light (vl) domain
EIVLTQSPGTLSLSPGERATLSCRVSSSISSSNLHWYQQKPGQSPRPLIYGTSNLASGVPVRFSGSGSGTDYTLTISRLEPEDFAVYYCQQWSSYPLYTFGGGTKVEIK

SEQ ID NO: 1013 - protein, 12 aa, synthetic construct
  source 1..12: note = 2G4[PDL1]_H1L1 vlCDR1
RVSSSISSSNLH

SEQ ID NO: 1014 - protein, 7 aa, synthetic construct
  source 1..7: note = 2G4[PDL1]_H1L1 vlCDR2
GTSNLAS

SEQ ID NO: 1015 - protein, 10 aa, synthetic construct
  source 1..10: note = 2G4[PDL1]_H1L1 vlCDR3
QQWSSYPLYT

SEQ ID NO: 1016 - protein, 447 aa, synthetic construct
  source 1..447: note = XENP25859 Heavy Chain - 2G4[PD-L1]_H1 Heavy Chain
EVQLLESGGGLVQPGGSLRLSCAASGFTFSSYDMSWVRQAPGKRLEWVSTISSGGSFTHYPDSVKGRFTISRDNSKNTLYLQMNSLRAEDTAVYYCVRRSGDWYFDVWGAGTTVTVSSASTKGPSVFPLAPSSKSTSGGTAALGCLVKDYFPEPVTVSWNSGALTSGVHTFPAVLQSSGLYSLSSVVTVPSSSLGTQTYICNVNHKPSNTKVDKKVEPKSCDKTHTCPPCPAPPVAGPSVFLFPPKPKDTLMISRTPEVTCVVVDVKHEDPEVKFNWYVDGVEVHNAKTKPREEQYNSTYRVVSVLTVLHQDWLNGKEYKCKVSNKALPAPIEKTISKAKGQPREPQVYTLPPSREEMTKNQVSLTCLVKGFYPSDIAVEWESNGQPENNYKTTPPVLDSDGSFFLYSKLTVDKSRWQQGNVFSCSVMHEALHNHYTQKSLSLSPGK

SEQ ID NO: 1017 - protein, 216 aa, synthetic construct
  source 1..216: note = XENP25859 Light Chain - 2G4[PD-L1]_L1 Light Chain
EIVLTQSPGTLSLSPGERATLSCRVSSSISSSNLHWYQQKPGQSPRPLIYGTSNLASGVPVRFSGSGSGTDYTLTISRLEPEDFAVYYCQQWSSYPLYTFGGGTKVEIKRTVAAPSVFIFPPSDEQLKSGTASVVCLLNNFYPREAKVQWKVDNALQSGNSQESVTEQDSKDSTYSLSSTLTLSKADYEKHKVYACEVTHQGLSSPVTKSFNRGEC

SEQ ID NO: 1018 - protein, 447 aa, synthetic construct
  source 1..447: note = XENP36627 Chain 1 - 2G4[PD-L1]_H1_IgG1_pI(-)_Isosteric_A_PVA_/S267K/L368D/K370S
EVQLLESGGGLVQPGGSLRLSCAASGFTFSSYDMSWVRQAPGKRLEWVSTISSGGSFTHYPDSVKGRFTISRDNSKNTLYLQMNSLRAEDTAVYYCVRRSGDWYFDVWGAGTTVTVSSASTKGPSVFPLAPSSKSTSGGTAALGCLVKDYFPEPVTVSWNSGALTSGVHTFPAVLQSSGLYSLSSVVTVPSSSLGTQTYICNVNHKPSDTKVDKKVEPKSCDKTHTCPPCPAPPVAGPSVFLFPPKPKDTLMISRTPEVTCVVVDVKHEDPEVKFNWYVDGVEVHNAKTKPREEEYNSTYRVVSVLTVLHQDWLNGKEYKCKVSNKALPAPIEKTISKAKGQPREPQVYTLPPSREEMTKNQVSLTCDVSGFYPSDIAVEWESDGQPENNYKTTPPVLDSDGSFFLYSKLTVDKSRWEQGDVFSCSVMHEALHNHYTQKSLSLSPGK

SEQ ID NO: 1019 - protein, 231 aa, synthetic construct
  source 1..231: note = XENP36627 Chain 2 - empty-Fc(216)_IgG1_ISO(+RR)_C220S/PVA_/S267K/S364K/E357Q
ERKSSDKTHTCPRCPAPPVAGPSVFLFPPKPKDTLMISRTPEVTCVVVDVKHEDPEVKFKWYVDGVEVHNAKTKPREEQYNSTYRVVSVLTVLHQDWLNGKEYKCKVSNKALPAPIEKTISKAKGQPREPQVYTLPPSREQMTKNQVKLTCLVKGFYPSDIAVEWESNGQPENNYKTTPPVLDSDGSFFLYSKLTVDKSRWQQGNVFSCSVMHEALHNHYTQKSLSLSPGK

SEQ ID NO: 1020 - protein, 216 aa, synthetic construct; identical to SEQ ID NO: 1017
  source 1..216: note = XENP36627 Chain 3 - 2G4[PD-L1]_L1

SEQ ID NO: 1021-1124 - skipped (104 entries)

SEQ ID NO: 1125 - protein, 449 aa, synthetic construct
  source 1..449: note = XENP34963 Chain 1 - avelumab[PD-L1]_H1_IgG1_pI(-)_Isosteric_A_/PVA_/S267K/L368D /K370S
EVQLLESGGGLVQPGGSLRLSCAASGFTFSSYIMMWVRQAPGKGLEWVSSIYPSGGITFYADTVKGRFTISRDNSKNTLYLQMNSLRAEDTAVYYCARIKLGTVTTVDYWGQGTLVTVSSASTKGPSVFPLAPSSKSTSGGTAALGCLVKDYFPEPVTVSWNSGALTSGVHTFPAVLQSSGLYSLSSVVTVPSSSLGTQTYICNVNHKPSDTKVDKKVEPKSCDKTHTCPPCPAPPVAGPSVFLFPPKPKDTLMISRTPEVTCVVVDVKHEDPEVKFNWYVDGVEVHNAKTKPREEEYNSTYRVVSVLTVLHQDWLNGKEYKCKVSNKALPAPIEKTISKAKGQPREPQVYTLPPSREEMTKNQVSLTCDVSGFYPSDIAVEWESDGQPENNYKTTPPVLDSDGSFFLYSKLTVDKSRWEQGDVFSCSVMHEALHNHYTQKSLSLSPGK

SEQ ID NO: 1126 - protein, 479 aa, synthetic construct
  source 1..479: note = XENP34963 Chain 2 - 1A7[CD28]_H1.14_L1_scFv(GKPGS)4_Fc(216)_IgG1_C220S/PVA_/S26 7K/S364K/E357Q
EVQLLESGGGLVQPGGSLRLSCAASGFTFSSYYMSWVRQAPGKGLEWVSTISESGDSTYYADSVKGRFTISRDNSKNTLYLQMNSLRAEDTAVYYCAKSGPGLRQVGFDYWGQGTLVTVSSGKPGSGKPGSGKPGSGKPGSDIQMTQSPSSLSASVGDRVTITCRASQSISSYLNWYQQKPGKAPKLLIYAASSLQSGVPSRFSGSGSGTDFTLTISSLQPEDFATYYCQQSYSTPFTFGQGTKLEIKEPKSSDKTHTCPPCPAPPVAGPSVFLFPPKPKDTLMISRTPEVTCVVVDVKHEDPEVKFNWYVDGVEVHNAKTKPREEQYNSTYRVVSVLTVLHQDWLNGKEYKCKVSNKALPAPIEKTISKAKGQPREPQVYTLPPSREQMTKNQVKLTCLVKGFYPSDIAVEWESNGQPENNYKTTPPVLDSDGSFFLYSKLTVDKSRWQQGNVFSCSVMHEALHNHYTQKSLSLSPGK

SEQ ID NO: 1127 - protein, 216 aa, synthetic construct
  source 1..216: note = XENP34963 Chain 3 - avelumab[PD-L1]_L1 Light Chain
QSALTQPASVSGSPGQSITISCTGTSSDVGGYNYVSWYQQHPGKAPKLMIYDVSNRPSGVSNRFSGSKSGNTASLTISGLQAEDEADYYCSSYTSSSTRVFGTGTKVTVLGQPKAAPSVTLFPPSSEELQANKATLVCLISDFYPGAVTVAWKADSSPVKAGVETTTPSKQSNNKYAASSYLSLTPEQWKSHRSYSCQVTHEGSTVEKTVAPTECS

SEQ ID NO: 1128 - protein, 447 aa, synthetic construct; identical to SEQ ID NO: 1018
  source 1..447: note = XENP36233 Chain 1 - 2G4[PD-L1]_H1_IgG1_pI(-)_Isosteric_A_/PVA_/S267K/L368D/K370 S

SEQ ID NO: 1129 - protein, 479 aa, synthetic construct; identical to SEQ ID NO: 1126
  source 1..479: note = XENP36233 Chain 2 - 1A7[CD28]_H1.14_L1_scFv(GKPGS)4_Fc(216)_IgG1_C220S/PVA_/S26 7K/S364K/E357Q

SEQ ID NO: 1130 - protein, 216 aa, synthetic construct; identical to SEQ ID NO: 1017
  source 1..216: note = XENP36233 Chain 3 - 2G4[PD-L1]_L1 Light Chain

SEQ ID NO: 1131 - protein, 447 aa, synthetic construct
  source 1..447: note = XENP36764 Chain 1 - 2G4[PD-L1]_H1_IgG1_pI(-)_Isosteric_A_/PVA_/S267K/L368D/K370 S/M428L/N434S
EVQLLESGGGLVQPGGSLRLSCAASGFTFSSYDMSWVRQAPGKRLEWVSTISSGGSFTHYPDSVKGRFTISRDNSKNTLYLQMNSLRAEDTAVYYCVRRSGDWYFDVWGAGTTVTVSSASTKGPSVFPLAPSSKSTSGGTAALGCLVKDYFPEPVTVSWNSGALTSGVHTFPAVLQSSGLYSLSSVVTVPSSSLGTQTYICNVNHKPSDTKVDKKVEPKSCDKTHTCPPCPAPPVAGPSVFLFPPKPKDTLMISRTPEVTCVVVDVKHEDPEVKFNWYVDGVEVHNAKTKPREEEYNSTYRVVSVLTVLHQDWLNGKEYKCKVSNKALPAPIEKTISKAKGQPREPQVYTLPPSREEMTKNQVSLTCDVSGFYPSDIAVEWESDGQPENNYKTTPPVLDSDGSFFLYSKLTVDKSRWEQGDVFSCSVLHEALHSHYTQKSLSLSPGK

SEQ ID NO: 1132 - protein, 479 aa, synthetic construct
  source 1..479: note = XENP36764 Chain 2 - 1A7[CD28]_H1.14_L1_scFv(GKPGS)4_Fc(216)_IgG1_C220S/PVA_/S26 7K/S364K/E357Q/M428L/N434S
EVQLLESGGGLVQPGGSLRLSCAASGFTFSSYYMSWVRQAPGKGLEWVSTISESGDSTYYADSVKGRFTISRDNSKNTLYLQMNSLRAEDTAVYYCAKSGPGLRQVGFDYWGQGTLVTVSSGKPGSGKPGSGKPGSGKPGSDIQMTQSPSSLSASVGDRVTITCRASQSISSYLNWYQQKPGKAPKLLIYAASSLQSGVPSRFSGSGSGTDFTLTISSLQPEDFATYYCQQSYSTPFTFGQGTKLEIKEPKSSDKTHTCPPCPAPPVAGPSVFLFPPKPKDTLMISRTPEVTCVVVDVKHEDPEVKFNWYVDGVEVHNAKTKPREEQYNSTYRVVSVLTVLHQDWLNGKEYKCKVSNKALPAPIEKTISKAKGQPREPQVYTLPPSREQMTKNQVKLTCLVKGFYPSDIAVEWESNGQPENNYKTTPPVLDSDGSFFLYSKLTVDKSRWQQGNVFSCSVLHEALHSHYTQKSLSLSPGK

SEQ ID NO: 1133 - protein, 216 aa, synthetic construct; identical to SEQ ID NO: 1017
  source 1..216: note = XENP36764 Chain 3 - 2G4[PD-L1]_L1 Light Chain

SEQ ID NO: 1134 - protein, 447 aa, synthetic construct; identical to SEQ ID NO: 1018
  source 1..447: note = XENP37261 Chain 1 - 2G4[PD-L1]_H1_IgG1_pI(-)_Isosteric_A_/PVA_/S267K/L368D/K370 S

SEQ ID NO: 1135 - protein, 479 aa, synthetic construct
  source 1..479: note = XENP37261 Chain 2 - 1A7[CD28]_H1.14_L1.71_scFv(GKPGS)4_Fc(216)_IgG1_C220S/PVA_/ S267K/S364K/E357Q
EVQLLESGGGLVQPGGSLRLSCAASGFTFSSYYMSWVRQAPGKGLEWVSTISESGDSTYYADSVKGRFTISRDNSKNTLYLQMNSLRAEDTAVYYCAKSGPGLRQVGFDYWGQGTLVTVSSGKPGSGKPGSGKPGSGKPGSDIQMTQSPSSLSASVGDRVTITCRASQSISSYLNWYQQKPGKAPKLLIYAASSLQSGVPSRFSGSGSGTDFTLTISSLQPEDFATYYCQQVYSTPFTFGQGTKLEIKEPKSSDKTHTCPPCPAPPVAGPSVFLFPPKPKDTLMISRTPEVTCVVVDVKHEDPEVKFNWYVDGVEVHNAKTKPREEQYNSTYRVVSVLTVLHQDWLNGKEYKCKVSNKALPAPIEKTISKAKGQPREPQVYTLPPSREQMTKNQVKLTCLVKGFYPSDIAVEWESNGQPENNYKTTPPVLDSDGSFFLYSKLTVDKSRWQQGNVFSCSVMHEALHNHYTQKSLSLSPGK

SEQ ID NO: 1136 - protein, 216 aa, synthetic construct; identical to SEQ ID NO: 1017
  source 1..216: note = XENP37261 Chain 3 - 2G4[PD-L1]_L1

SEQ ID NO: 1137 - protein, 447 aa, synthetic construct; identical to SEQ ID NO: 1131
  source 1..447: note = XENP37302 Chain 1 - 2G4[PD-L1]_H1_IgG1_pI(-)_Isosteric_A_/PVA_/S267K/L368D/K370 S/M428L/N434S

SEQ ID NO: 1138 - protein, 479 aa, synthetic construct
  source 1..479: note = XENP37302 Chain 2 - 1A7[CD28]_H1.14_L1.71_scFv(GKPGS)4_Fc(216)_IgG1_C220S/PVA_/ S267K/S364K/E357Q/M428L/N434S
EVQLLESGGGLVQPGGSLRLSCAASGFTFSSYYMSWVRQAPGKGLEWVSTISESGDSTYYADSVKGRFTISRDNSKNTLYLQMNSLRAEDTAVYYCAKSGPGLRQVGFDYWGQGTLVTVSSGKPGSGKPGSGKPGSGKPGSDIQMTQSPSSLSASVGDRVTITCRASQSISSYLNWYQQKPGKAPKLLIYAASSLQSGVPSRFSGSGSGTDFTLTISSLQPEDFATYYCQQVYSTPFTFGQGTKLEIKEPKSSDKTHTCPPCPAPPVAGPSVFLFPPKPKDTLMISRTPEVTCVVVDVKHEDPEVKFNWYVDGVEVHNAKTKPREEQYNSTYRVVSVLTVLHQDWLNGKEYKCKVSNKALPAPIEKTISKAKGQPREPQVYTLPPSREQMTKNQVKLTCLVKGFYPSDIAVEWESNGQPENNYKTTPPVLDSDGSFFLYSKLTVDKSRWQQGNVFSCSVLHEALHSHYTQKSLSLSPGK

SEQ ID NO: 1139 - protein, 216 aa, synthetic construct; identical to SEQ ID NO: 1017
  source 1..216: note = XENP37302 Chain 3 - 2G4[PD-L1]_L1 Light Chain

SEQ ID NO: 1140 - protein, 447 aa, synthetic construct; identical to SEQ ID NO: 1018
  source 1..447: note = XENP37412 Chain 1 - 2G4[PD-L1]_H1_IgG1_pI(-)_Isosteric_A_/PVA_/S267K/L368D/K370 S

SEQ ID NO: 1141 - protein, 216 aa, synthetic construct; identical to SEQ ID NO: 1017
  source 1..216: note = XENP37412 Chain 3 - 2G4[PD-L1]_L1

SEQ ID NO: 1142 - protein, 447 aa, synthetic construct; identical to SEQ ID NO: 1018
  source 1..447: note = XENP37559 Chain 1 - 2G4[PD-L1]_H1_IgG1_pI(-)_Isosteric_A_/PVA_/S267K/L368D/K370 S

SEQ ID NO: 1143 - protein, 479 aa, synthetic construct
  source 1..479: note = XENP37559 Chain 2 - 1A7[CD28]_H1_L1.71_scFv(GKPGS)4_Fc(216)_IgG1_C220S/PVA_/S26 7K/S364K/E357Q
EVQLLESGGGLVQPGGSLRLSCAASGFTFSSYAMSWVRQAPGKGLEWVSTISGSGDSTYYADSVKGRFTISRDNSKNTLYLQMNSLRAEDTAVYYCAKSGPGLRQVGFDYWGQGTLVTVSSGKPGSGKPGSGKPGSGKPGSDIQMTQSPSSLSASVGDRVTITCRASQSISSYLNWYQQKPGKAPKLLIYAASSLQSGVPSRFSGSGSGTDFTLTISSLQPEDFATYYCQQVYSTPFTFGQGTKLEIKEPKSSDKTHTCPPCPAPPVAGPSVFLFPPKPKDTLMISRTPEVTCVVVDVKHEDPEVKFNWYVDGVEVHNAKTKPREEQYNSTYRVVSVLTVLHQDWLNGKEYKCKVSNKALPAPIEKTISKAKGQPREPQVYTLPPSREQMTKNQVKLTCLVKGFYPSDIAVEWESNGQPENNYKTTPPVLDSDGSFFLYSKLTVDKSRWQQGNVFSCSVMHEALHNHYTQKSLSLSPGK

SEQ ID NO: 1144 - protein, 216 aa, synthetic construct; identical to SEQ ID NO: 1017
  source 1..216: note = XENP37559 Chain 3 - 2G4[PD-L1]_L1

SEQ ID NO: 1145 - protein, 447 aa, synthetic construct; identical to SEQ ID NO: 1018
  source 1..447: note = XENP37560 Chain 1 - 2G4[PD-L1]_H1_IgG1_pI(-)_Isosteric_A_/PVA_/S267K/L368D/K370 S

SEQ ID NO: 1146 - protein, 479 aa, synthetic construct
  source 1..479: note = XENP37560 Chain 2 - 1A7[CD28]_H1.1_L1.71_scFv(GKPGS)4_Fc(216)_IgG1_C220S/PVA_/S 267K/S364K/E357Q
EVQLLESGGGLVQPGGSLRLSCAASGFTFSSYYMSWVRQAPGKGLEWVSTISGSGDSTYYADSVKGRFTISRDNSKNTLYLQMNSLRAEDTAVYYCAKSGPGLRQVGFDYWGQGTLVTVSSGKPGSGKPGSGKPGSGKPGSDIQMTQSPSSLSASVGDRVTITCRASQSISSYLNWYQQKPGKAPKLLIYAASSLQSGVPSRFSGSGSGTDFTLTISSLQPEDFATYYCQQVYSTPFTFGQGTKLEIKEPKSSDKTHTCPPCPAPPVAGPSVFLFPPKPKDTLMISRTPEVTCVVVDVKHEDPEVKFNWYVDGVEVHNAKTKPREEQYNSTYRVVSVLTVLHQDWLNGKEYKCKVSNKALPAPIEKTISKAKGQPREPQVYTLPPSREQMTKNQVKLTCLVKGFYPSDIAVEWESNGQPENNYKTTPPVLDSDGSFFLYSKLTVDKSRWQQGNVFSCSVMHEALHNHYTQKSLSLSPGK

SEQ ID NO: 1147 - protein, 216 aa, synthetic construct; identical to SEQ ID NO: 1017
  source 1..216: note = XENP37560 Chain 3 - 2G4[PD-L1]_L1

SEQ ID NO: 1148 - protein, 447 aa, synthetic construct; identical to SEQ ID NO: 1018
  source 1..447: note = XENP37561 Chain 1 - 2G4[PD-L1]_H1_IgG1_pI(-)_Isosteric_A_/PVA_/S267K/L368D/K370 S

SEQ ID NO: 1149 - protein, 479 aa, synthetic construct
  source 1..479: note = XENP37561 Chain 2 - 1A7[CD28]_L1.71_H1.14_scFv(GKPGS)4_Fc(216)_IgG1_C220S/PVA_/ S267K/S364K/E357Q
DIQMTQSPSSLSASVGDRVTITCRASQSISSYLNWYQQKPGKAPKLLIYAASSLQSGVPSRFSGSGSGTDFTLTISSLQPEDFATYYCQQVYSTPFTFGQGTKLEIKGKPGSGKPGSGKPGSGKPGSEVQLLESGGGLVQPGGSLRLSCAASGFTFSSYYMSWVRQAPGKGLEWVSTISESGDSTYYADSVKGRFTISRDNSKNTLYLQMNSLRAEDTAVYYCAKSGPGLRQVGFDYWGQGTLVTVSSEPKSSDKTHTCPPCPAPPVAGPSVFLFPPKPKDTLMISRTPEVTCVVVDVKHEDPEVKFNWYVDGVEVHNAKTKPREEQYNSTYRVVSVLTVLHQDWLNGKEYKCKVSNKALPAPIEKTISKAKGQPREPQVYTLPPSREQMTKNQVKLTCLVKGFYPSDIAVEWESNGQPENNYKTTPPVLDSDGSFFLYSKLTVDKSRWQQGNVFSCSVMHEALHNHYTQKSLSLSPGK

SEQ ID NO: 1150 - protein, 216 aa, synthetic construct; identical to SEQ ID NO: 1017
  source 1..216: note = XENP37561 Chain 3 - 2G4[PD-L1]_L1

SEQ ID NO: 1151 - protein, 447 aa, synthetic construct
  source 1..447: note = XENP38482 Chain 1 - 2G4[PD-L1]_H1.1_IgG1_pI(-)_Isosteric_A_/PVA_/S267K/L368D/K3 70S
EVQLLESGGGLVQPGGSLRLSCAASGFTFPSRDMSWVRQAPGKRLEWVSTISSGGSFTHYPDSVKGRFTISRDNSKNTLYLQMNSLRAEDTAVYYCVRRSGDWYFDVWGAGTTVTVSSASTKGPSVFPLAPSSKSTSGGTAALGCLVKDYFPEPVTVSWNSGALTSGVHTFPAVLQSSGLYSLSSVVTVPSSSLGTQTYICNVNHKPSDTKVDKKVEPKSCDKTHTCPPCPAPPVAGPSVFLFPPKPKDTLMISRTPEVTCVVVDVKHEDPEVKFNWYVDGVEVHNAKTKPREEEYNSTYRVVSVLTVLHQDWLNGKEYKCKVSNKALPAPIEKTISKAKGQPREPQVYTLPPSREEMTKNQVSLTCDVSGFYPSDIAVEWESDGQPENNYKTTPPVLDSDGSFFLYSKLTVDKSRWEQGDVFSCSVMHEALHNHYTQKSLSLSPGK

SEQ ID NO: 1152 - protein, 479 aa, synthetic construct; identical to SEQ ID NO: 1143
  source 1..479: note = XENP38482 Chain 2 - 1A7[CD28]_H1_L1.71_scFv(GKPGS)4_Fc(216)_IgG1_C220S/PVA_/S26 7K/S364K/E357Q

SEQ ID NO: 1153 - protein, 216 aa, synthetic construct
  source 1..216: note = XENP38482 Chain 3 - 2G4[PD-L1]_L1.1 Light Chain
EIVLTQSPGTLSLSPGERATLSCRVSSSISSSNLHWYQQKPGQSPRPLIYGTSNLASGVPVRFSGSGSGTDYTLTISRLEPEDFAVYYCQQWWSYPLYTFGGGTKVEIKRTVAAPSVFIFPPSDEQLKSGTASVVCLLNNFYPREAKVQWKVDNALQSGNSQESVTEQDSKDSTYSLSSTLTLSKADYEKHKVYACEVTHQGLSSPVTKSFNRGEC

SEQ ID NO: 1154 - protein, 447 aa, synthetic construct
  source 1..447: note = XENP38490 Chain 1 - 2G4[PD-L1]_H1.9_IgG1_pI(-)_Isosteric_A_/PVA_/S267K/L368D/K3 70S
EVQLLESGGGLVQPGGSLRLSCAASGFTFSFRDMSWVRQAPGKRLEWVSTISSGGSFTHYPDSVKGRFTISRDNSKNTLYLQMNSLRAEDTAVYYCVRRSGDWYFDVWGAGTTVTVSSASTKGPSVFPLAPSSKSTSGGTAALGCLVKDYFPEPVTVSWNSGALTSGVHTFPAVLQSSGLYSLSSVVTVPSSSLGTQTYICNVNHKPSDTKVDKKVEPKSCDKTHTCPPCPAPPVAGPSVFLFPPKPKDTLMISRTPEVTCVVVDVKHEDPEVKFNWYVDGVEVHNAKTKPREEEYNSTYRVVSVLTVLHQDWLNGKEYKCKVSNKALPAPIEKTISKAKGQPREPQVYTLPPSREEMTKNQVSLTCDVSGFYPSDIAVEWESDGQPENNYKTTPPVLDSDGSFFLYSKLTVDKSRWEQGDVFSCSVMHEALHNHYTQKSLSLSPGK

SEQ ID NO: 1155 - protein, 479 aa, synthetic construct; identical to SEQ ID NO: 1143
  source 1..479: note = XENP38490 Chain 2 - 1A7[CD28]_H1_L1.71_scFv(GKPGS)4_Fc(216)_IgG1_C220S/PVA_/S26 7K/S364K/E357Q

SEQ ID NO: 1156 - protein, 216 aa, synthetic construct; identical to SEQ ID NO: 1017
  source 1..216: note = XENP38490 Chain 3 - 2G4[PD-L1]_L1

SEQ ID NO: 1157 - protein, 447 aa, synthetic construct
  source 1..447: note = XENP38494 Chain 1 - 2G4[PD-L1]_H1.10_IgG1_pI(-)_Isosteric_A_/PVA_/S267K/L368D/K 370S
EVQLLESGGGLVQPGGSLRLSCAASGFTFSWYDMSWVRQAPGKRLEWVSTISSGGSFTHYPDSVKGRFTISRDNSKNTLYLQMNSLRAEDTAVYYCVRRSGDWYFDVWGAGTTVTVSSASTKGPSVFPLAPSSKSTSGGTAALGCLVKDYFPEPVTVSWNSGALTSGVHTFPAVLQSSGLYSLSSVVTVPSSSLGTQTYICNVNHKPSDTKVDKKVEPKSCDKTHTCPPCPAPPVAGPSVFLFPPKPKDTLMISRTPEVTCVVVDVKHEDPEVKFNWYVDGVEVHNAKTKPREEEYNSTYRVVSVLTVLHQDWLNGKEYKCKVSNKALPAPIEKTISKAKGQPREPQVYTLPPSREEMTKNQVSLTCDVSGFYPSDIAVEWESDGQPENNYKTTPPVLDSDGSFFLYSKLTVDKSRWEQGDVFSCSVMHEALHNHYTQKSLSLSPGK

SEQ ID NO: 1158 - protein, 479 aa, synthetic construct; identical to SEQ ID NO: 1143
  source 1..479: note = XENP38494 Chain 2 - 1A7[CD28]_H1_L1.71_scFv(GKPGS)4_Fc(216)_IgG1_C220S/PVA_/S26 7K/S364K/E357Q

SEQ ID NO: 1159 - protein, 216 aa, synthetic construct
  source 1..216: note = XENP38494 Chain 3 - 2G4[PD-L1]_L1.23 Light Chain
EIVLTQSPGTLSLSPGERATLSCRVSLSIQSSNLHWYQQKPGQSPRPLIYGTNLLASGVPVRFSGSGSGTDYTLTISRLEPEDFAVYYCQQWSSYPLYTFGGGTKVEIKRTVAAPSVFIFPPSDEQLKSGTASVVCLLNNFYPREAKVQWKVDNALQSGNSQESVTEQDSKDSTYSLSSTLTLSKADYEKHKVYACEVTHQGLSSPVTKSFNRGEC

SEQ ID NO: 1160 - protein, 447 aa, synthetic construct; identical to SEQ ID NO: 1018
  source 1..447: note = XENP38502 Chain 1 - 2G4[PD-L1]_H1_IgG1_pI(-)_Isosteric_A_/PVA_/S267K/L368D/K370 S

SEQ ID NO: 1161 - protein, 479 aa, synthetic construct; identical to SEQ ID NO: 1143
  source 1..479: note = XENP38502 Chain 2 - 1A7[CD28]_H1_L1.71_scFv(GKPGS)4_Fc(216)_IgG1_C220S/PVA_/S26 7K/S364K/E357Q

SEQ ID NO: 1162 - protein, 216 aa, synthetic construct
  source 1..216: note = XENP38502 Chain 3 - 2G4[PD-L1]_L1.25 Light Chain
EIVLTQSPGTLSLSPGERATLSCRVSSSIQPSNLHWYQQKPGQSPRPLIYGTSNLASGVPVRFSGSGSGTDYTLTISRLEPEDFAVYYCQQWSSYPLYTFGGGTKVEIKRTVAAPSVFIFPPSDEQLKSGTASVVCLLNNFYPREAKVQWKVDNALQSGNSQESVTEQDSKDSTYSLSSTLTLSKADYEKHKVYACEVTHQGLSSPVTKSFNRGEC

SEQ ID NO: 1163 - protein, 447 aa, synthetic construct
  source 1..447: note = XENP38506 Chain 1 - 2G4[PD-L1]_H1.8_IgG1_pI(-)_Isosteric_A_/PVA_/S267K/L368D/K3 70S
EVQLLESGGGLVQPGGSLRLSCAASGFTFSSSDMSWVRQAPGKRLEWVSTISSGGSFTHYPDSVKGRFTISRDNSKNTLYLQMNSLRAEDTAVYYCVRRSGDWYFDVWGAGTTVTVSSASTKGPSVFPLAPSSKSTSGGTAALGCLVKDYFPEPVTVSWNSGALTSGVHTFPAVLQSSGLYSLSSVVTVPSSSLGTQTYICNVNHKPSDTKVDKKVEPKSCDKTHTCPPCPAPPVAGPSVFLFPPKPKDTLMISRTPEVTCVVVDVKHEDPEVKFNWYVDGVEVHNAKTKPREEEYNSTYRVVSVLTVLHQDWLNGKEYKCKVSNKALPAPIEKTISKAKGQPREPQVYTLPPSREEMTKNQVSLTCDVSGFYPSDIAVEWESDGQPENNYKTTPPVLDSDGSFFLYSKLTVDKSRWEQGDVFSCSVMHEALHNHYTQKSLSLSPGK

SEQ ID NO: 1164 - protein, 479 aa, synthetic construct; identical to SEQ ID NO: 1143
  source 1..479: note = XENP38506 Chain 2 - 1A7[CD28]_H1_L1.71_scFv(GKPGS)4_Fc(216)_IgG1_C220S/PVA_/S26 7K/S364K/E357Q

SEQ ID NO: 1165 - protein, 216 aa, synthetic construct
  source 1..216: note = XENP38506 Chain 3 - 2G4[PD-L1]_L1.26 Light Chain
EIVLTQSPGTLSLSPGERATLSCRASSSIQDSNLHWYQQKPGQSPRLLIYGTSNLRSGVPVRFSGSGSGTDYTLTISRLEPEDFAVYYCQQWSSYPLYTFGGGTKVEIKRTVAAPSVFIFPPSDEQLKSGTASVVCLLNNFYPREAKVQWKVDNALQSGNSQESVTEQDSKDSTYSLSSTLTLSKADYEKHKVYACEVTHQGLSSPVTKSFNRGEC

SEQ ID NO: 1166 - protein, 447 aa, synthetic construct; identical to SEQ ID NO: 1018
  source 1..447: note = XENP38510 Chain 1 - 2G4[PD-L1]_H1_IgG1_pI(-)_Isosteric_A_/PVA_/S267K/L368D/K370 S

SEQ ID NO: 1167 - protein, 479 aa, synthetic construct; identical to SEQ ID NO: 1143
  source 1..479: note = XENP38510 Chain 2 - 1A7[CD28]_H1_L1.71_scFv(GKPGS)4_Fc(216)_IgG1_C220S/PVA_/S26 7K/S364K/E357Q

SEQ ID NO: 1168 - protein, 216 aa, synthetic construct
  source 1..216: note = XENP38510 Chain 3 - 2G4[PD-L1]_L1.27 Light Chain
EIVLTQSPGTLSLSPGERATLSCRVSSSIQGSNLHWYQQKPGQSPRPLIYGTSNLASGVPVRFSGSGSGTDYTLTISRLEPEDFAVYYCQQWSSYPLYTFGGGTKVEIKRTVAAPSVFIFPPSDEQLKSGTASVVCLLNNFYPREAKVQWKVDNALQSGNSQESVTEQDSKDSTYSLSSTLTLSKADYEKHKVYACEVTHQGLSSPVTKSFNRGEC

SEQ ID NO: 1169 - protein, 447 aa, synthetic construct
  source 1..447: note = XENP38512 Chain 1 - 2G4[PD-L1]_H1.12_IgG1_pI(-)_Isosteric_A_/PVA_/S267K/L368D/K 370S
EVQLLESGGGLVQPGGSLRLSCAASGFTFSVYDMSWVRQAPGKRLEWVSTISSGGSFTHYPDSVKGRFTISRDNSKNTLYLQMNSLRAEDTAVYYCVRRSLDWYFDVWGAGTTVTVSSASTKGPSVFPLAPSSKSTSGGTAALGCLVKDYFPEPVTVSWNSGALTSGVHTFPAVLQSSGLYSLSSVVTVPSSSLGTQTYICNVNHKPSDTKVDKKVEPKSCDKTHTCPPCPAPPVAGPSVFLFPPKPKDTLMISRTPEVTCVVVDVKHEDPEVKFNWYVDGVEVHNAKTKPREEEYNSTYRVVSVLTVLHQDWLNGKEYKCKVSNKALPAPIEKTISKAKGQPREPQVYTLPPSREEMTKNQVSLTCDVSGFYPSDIAVEWESDGQPENNYKTTPPVLDSDGSFFLYSKLTVDKSRWEQGDVFSCSVMHEALHNHYTQKSLSLSPGK

SEQ ID NO: 1170 - protein, 479 aa, synthetic construct; identical to SEQ ID NO: 1135
  source 1..479: note = XENP38512 Chain 2 - 1A7[CD28]_H1.14_L1.71_scFv(GKPGS)4_Fc(216)_IgG1_C220S/PVA_/ S267K/S364K/E357Q

SEQ ID NO: 1171 - protein, 216 aa, synthetic construct
  source 1..216: note = XENP38512 Chain 3 - 2G4[PD-L1]_L1.24 Light Chain
EIVLTQSPGTLSLSPGERATLSCRVSSSIQSTNLHWYQQKPGQSPRPLIYGTSVLATGVPVRFSGSGSGTDYTLTISRLEPEDFAVYYCQQWSSYPLYTFGGGTKVEIKRTVAAPSVFIFPPSDEQLKSGTASVVCLLNNFYPREAKVQWKVDNALQSGNSQESVTEQDSKDSTYSLSSTLTLSKADYEKHKVYACEVTHQGLSSPVTKSFNRGEC

SEQ ID NO: 1172 - protein, 447 aa, synthetic construct; identical to SEQ ID NO: 1169
  source 1..447: note = XENP38514 Chain 1 - 2G4[PD-L1]_H1.12_IgG1_pI(-)_Isosteric_A_/PVA_/S267K/L368D/K 370S

SEQ ID NO: 1173 - protein, 479 aa, synthetic construct; identical to SEQ ID NO: 1143
  source 1..479: note = XENP38514 Chain 2 - 1A7[CD28]_H1_L1.71_scFv(GKPGS)4_Fc(216)_IgG1_C220S/PVA_/S26 7K/S364K/E357Q

SEQ ID NO: 1174 - protein, 216 aa, synthetic construct; identical to SEQ ID NO: 1171
  source 1..216: note = XENP38514 Chain 3 - 2G4[PD-L1]_L1.24

SEQ ID NO: 1175 - protein, 447 aa, synthetic construct
  source 1..447: note = XENP38518 Chain 1 - 2G4[PD-L1]_H1.14_IgG1_pI(-)_Isosteric_A_/PVA_/S267K/L368D/K 370S
EVQLLESGGGLVQPGGSLRLSCAASGFTFSSSDMSWVRQAPGKRLEWVSTISSGGSFTHYPDSVKGRFTISRDNSKNTLYLQMNSLRAEDTAVYYCVRRSLDWYFDVWGAGTTVTVSSASTKGPSVFPLAPSSKSTSGGTAALGCLVKDYFPEPVTVSWNSGALTSGVHTFPAVLQSSGLYSLSSVVTVPSSSLGTQTYICNVNHKPSDTKVDKKVEPKSCDKTHTCPPCPAPPVAGPSVFLFPPKPKDTLMISRTPEVTCVVVDVKHEDPEVKFNWYVDGVEVHNAKTKPREEEYNSTYRVVSVLTVLHQDWLNGKEYKCKVSNKALPAPIEKTISKAKGQPREPQVYTLPPSREEMTKNQVSLTCDVSGFYPSDIAVEWESDGQPENNYKTTPPVLDSDGSFFLYSKLTVDKSRWEQGDVFSCSVMHEALHNHYTQKSLSLSPGK

SEQ ID NO: 1176 - protein, 479 aa, synthetic construct; identical to SEQ ID NO: 1143
  source 1..479: note = XENP38518 Chain 2 - 1A7[CD28]_H1_L1.71_scFv(GKPGS)4_Fc(216)_IgG1_C220S/PVA_/S26 7K/S364K/E357Q

SEQ ID NO: 1177 - protein, 216 aa, synthetic construct; identical to SEQ ID NO: 1165
  source 1..216: note = XENP38518 Chain 3 - 2G4[PD-L1]_L1.26 Light Chain

SEQ ID NO: 1178 - protein, 447 aa, synthetic construct
  source 1..447: note = XENP38522 Chain 1 - 2G4[PD-L1]_H1.59_IgG1_pI(-)_Isosteric_A_/PVA_/S267K/L368D/K 370S
EVQLLESGGGLVQPGGSLRLSCAASGFTFHSRDMSWVRQAPGKGLEWVSTISSGGRFTHYPDSVKGRFTISRDNSKNTLYLQMNSLRAEDTAVYYCARRSGDWYFDVWGAGTTVTVSSASTKGPSVFPLAPSSKSTSGGTAALGCLVKDYFPEPVTVSWNSGALTSGVHTFPAVLQSSGLYSLSSVVTVPSSSLGTQTYICNVNHKPSDTKVDKKVEPKSCDKTHTCPPCPAPPVAGPSVFLFPPKPKDTLMISRTPEVTCVVVDVKHEDPEVKFNWYVDGVEVHNAKTKPREEEYNSTYRVVSVLTVLHQDWLNGKEYKCKVSNKALPAPIEKTISKAKGQPREPQVYTLPPSREEMTKNQVSLTCDVSGFYPSDIAVEWESDGQPENNYKTTPPVLDSDGSFFLYSKLTVDKSRWEQGDVFSCSVMHEALHNHYTQKSLSLSPGK

SEQ ID NO: 1179 - protein, 479 aa, synthetic construct; identical to SEQ ID NO: 1143
  source 1..479: note = XENP38522 Chain 2 - 1A7[CD28]_H1_L1.71_scFv(GKPGS)4_Fc(216)_IgG1_C220S/PVA_/S26 7K/S364K/E357Q

SEQ ID NO: 1180 - protein, 216 aa, synthetic construct
  source 1..216: note = XENP38522 Chain 3 - 2G4[PD-L1]_L1.60 Light Chain
EIVLTQSPGTLSLSPGERATLSCRASSSISSSNLHWYQQKPGQSPRLLIYGTSNLASGVPVRFSGSGSGTDYTLTISRLEPEDFAVYYCQQWSSYPLWTFGGGTKVEIKRTVAAPSVFIFPPSDEQLKSGTASVVCLLNNFYPREAKVQWKVDNALQSGNSQESVTEQDSKDSTYSLSSTLTLSKADYEKHKVYACEVTHQGLSSPVTKSFNRGEC

SEQ ID NO: 1181 - protein, 447 aa, synthetic construct
  source 1..447: note = XENP38526 Chain 1 - 2G4[PD-L1]_H1.60_IgG1_pI(-)_Isosteric_A_/PVA_/S267K/L368D/K 370S
EVQLLESGGGLVQPGGSLRLSCAASGFTFSSSDMSWVRQAPGKGLEWVSTISSGGSFTHYPDSVKGRFTISRDNSKNTLYLQMNSLRAEDTAVYYCARRSLDWYFDVWGAGTTVTVSSASTKGPSVFPLAPSSKSTSGGTAALGCLVKDYFPEPVTVSWNSGALTSGVHTFPAVLQSSGLYSLSSVVTVPSSSLGTQTYICNVNHKPSDTKVDKKVEPKSCDKTHTCPPCPAPPVAGPSVFLFPPKPKDTLMISRTPEVTCVVVDVKHEDPEVKFNWYVDGVEVHNAKTKPREEEYNSTYRVVSVLTVLHQDWLNGKEYKCKVSNKALPAPIEKTISKAKGQPREPQVYTLPPSREEMTKNQVSLTCDVSGFYPSDIAVEWESDGQPENNYKTTPPVLDSDGSFFLYSKLTVDKSRWEQGDVFSCSVMHEALHNHYTQKSLSLSPGK

SEQ ID NO: 1182 - protein, 479 aa, synthetic construct; identical to SEQ ID NO: 1143
  source 1..479: note = XENP38526 Chain 2 - 1A7[CD28]_H1_L1.71_scFv(GKPGS)4_Fc(216)_IgG1_C220S/PVA_/S26 7K/S364K/E357Q

SEQ ID NO: 1183 - protein, 216 aa, synthetic construct; identical to SEQ ID NO: 1180
  source 1..216: note = XENP38526 Chain 3 - 2G4[PD-L1]_L1.60 Light Chain

SEQ ID NO: 1184 - protein, 447 aa, synthetic construct; identical to SEQ ID NO: 1018
  source 1..447: note = XENP38580 Chain 1 - 2G4[PD-L1]_H1_IgG1_pI(-)_Isosteric_A_/PVA_/S267K/L368D/K370 S

SEQ ID NO: 1185 - protein, 479 aa, synthetic construct; identical to SEQ ID NO: 1143
  source 1..479: note = XENP38580 Chain 2 - 1A7[CD28]_H1_L1.71_scFv(GKPGS)4_Fc(216)_IgG1_C220S/PVA_/S26 7K/S364K/E357Q

SEQ ID NO: 1186 - protein, 216 aa, synthetic construct
  source 1..216: note = XENP38580 Chain 3 - 2G4[PD-L1]_L1.29 Light Chain
EIVLTQSPGTLSLSPGERATLSCRVSSRIVLSNLHWYQQKPGQSPRPLIYGTSVLATGVPVRFSGSGSGTDYTLTISRLEPEDFAVYYCQQWSSYPLWTFGGGTKVEIKRTVAAPSVFIFPPSDEQLKSGTASVVCLLNNFYPREAKVQWKVDNALQSGNSQESVTEQDSKDSTYSLSSTLTLSKADYEKHKVYACEVTHQGLSSPVTKSFNRGEC

SEQ ID NO: 1187 - protein, 447 aa, synthetic construct
  source 1..447: note = XENP38584 Chain 1 - 2G4[PD-L1]_H1.4_IgG1_pI(-)_Isosteric_A_/PVA_/S267K/L368D/K3 70S
EVQLLESGGGLVQPGGSLRLSCAASGFTFSSYDMSWVRQAPGKRLEWVSTISSGGSFTHYPDSVKGRFTISRDNSKNTLYLQMNSLRAEDTAVYYCARRSLDWYFDVWGAGTTVTVSSASTKGPSVFPLAPSSKSTSGGTAALGCLVKDYFPEPVTVSWNSGALTSGVHTFPAVLQSSGLYSLSSVVTVPSSSLGTQTYICNVNHKPSDTKVDKKVEPKSCDKTHTCPPCPAPPVAGPSVFLFPPKPKDTLMISRTPEVTCVVVDVKHEDPEVKFNWYVDGVEVHNAKTKPREEEYNSTYRVVSVLTVLHQDWLNGKEYKCKVSNKALPAPIEKTISKAKGQPREPQVYTLPPSREEMTKNQVSLTCDVSGFYPSDIAVEWESDGQPENNYKTTPPVLDSDGSFFLYSKLTVDKSRWEQGDVFSCSVMHEALHNHYTQKSLSLSPGK

SEQ ID NO: 1188 - protein, 479 aa, synthetic construct; identical to SEQ ID NO: 1143
  source 1..479: note = XENP38584 Chain 2 - 1A7[CD28]_H1_L1.71_scFv(GKPGS)4_Fc(216)_IgG1_C220S/PVA_/S26 7K/S364K/E357Q

SEQ ID NO: 1189 - protein, 216 aa, synthetic construct; identical to SEQ ID NO: 1159
  source 1..216: note = XENP38584 Chain 3 - 2G4[PD-L1]_L1.23

SEQ ID NO: 1190 - protein, 447 aa, synthetic construct; identical to SEQ ID NO: 1187
  source 1..447: note = XENP38585 Chain 1 - 2G4[PD-L1]_H1.4_IgG1_pI(-)_Isosteric_A_/PVA_/S267K/L368D/K3 70S

SEQ ID NO: 1191 - protein, 479 aa, synthetic construct; identical to SEQ ID NO: 1143
  source 1..479: note = XENP38585 Chain 2 - 1A7[CD28]_H1_L1.71_scFv(GKPGS)4_Fc(216)_IgG1_C220S/PVA_/S26 7K/S364K/E357Q

SEQ ID NO: 1192 - protein, 216 aa, synthetic construct; identical to SEQ ID NO: 1171
  source 1..216: note = XENP38585 Chain 3 - 2G4[PD-L1]_L1.24

SEQ ID NO: 1193 - protein, 447 aa, synthetic construct
  source 1..447: note = XENP38586 Chain 1 - 2G4[PD-L1]_H1.61_IgG1_pI(-)_Isosteric_A_/PVA_/S267K/L368D/K 370S
EVQLLESGGGLVQPGGSLRLSCAASGFTFSSYDMSWVRQAPGKGLEWVSTISSGGSFTHYPDSVKGRFTISRDNSKNTLYLQMNSLRAEDTAVYYCARRSLDWYFDVWGAGTTVTVSSASTKGPSVFPLAPSSKSTSGGTAALGCLVKDYFPEPVTVSWNSGALTSGVHTFPAVLQSSGLYSLSSVVTVPSSSLGTQTYICNVNHKPSDTKVDKKVEPKSCDKTHTCPPCPAPPVAGPSVFLFPPKPKDTLMISRTPEVTCVVVDVKHEDPEVKFNWYVDGVEVHNAKTKPREEEYNSTYRVVSVLTVLHQDWLNGKEYKCKVSNKALPAPIEKTISKAKGQPREPQVYTLPPSREEMTKNQVSLTCDVSGFYPSDIAVEWESDGQPENNYKTTPPVLDSDGSFFLYSKLTVDKSRWEQGDVFSCSVMHEALHNHYTQKSLSLSPGK

SEQ ID NO: 1194 - protein, 479 aa, synthetic construct; identical to SEQ ID NO: 1143
  source 1..479: note = XENP38586 Chain 2 - 1A7[CD28]_H1_L1.71_scFv(GKPGS)4_Fc(216)_IgG1_C220S/PVA_/S26 7K/S364K/E357Q

SEQ ID NO: 1195 - protein, 216 aa, synthetic construct
  source 1..216: note = XENP38586 Chain 3 - 2G4[PD-L1]_L1.61 Light Chain
EIVLTQSPGTLSLSPGERATLSCRASLSIQSSNLHWYQQKPGQSPRLLIYGTNLLASGVPVRFSGSGSGTDYTLTISRLEPEDFAVYYCQQWSSYPLYTFGGGTKVEIKRTVAAPSVFIFPPSDEQLKSGTASVVCLLNNFYPREAKVQWKVDNALQSGNSQESVTEQDSKDSTYSLSSTLTLSKADYEKHKVYACEVTHQGLSSPVTKSFNRGEC

SEQ ID NO: 1196 - protein, 447 aa, synthetic construct; identical to SEQ ID NO: 1193
  source 1..447: note = XENP38587 Chain 1 - 2G4[PD-L1]_H1.61_IgG1_pI(-)_Isosteric_A_/PVA_/S267K/L368D/K 370S

SEQ ID NO: 1197 - protein, 479 aa, synthetic construct; identical to SEQ ID NO: 1143
  source 1..479: note = XENP38587 Chain 2 - 1A7[CD28]_H1_L1.71_scFv(GKPGS)4_Fc(216)_IgG1_C220S/PVA_/S26 7K/S364K/E357Q

SEQ ID NO: 1198 - protein, 216 aa, synthetic construct
  source 1..216: note = XENP38587 Chain 3 - 2G4[PD-L1]_L1.62 Light Chain
EIVLTQSPGTLSLSPGERATLSCRASSSIQSTNLHWYQQKPGQSPRLLIYGTSVLATGVPVRFSGSGSGTDYTLTISRLEPEDFAVYYCQQWSSYPLYTFGGGTKVEIKRTVAAPSVFIFPPSDEQLKSGTASVVCLLNNFYPREAKVQWKVDNALQSGNSQESVTEQDSKDSTYSLSSTLTLSKADYEKHKVYACEVTHQGLSSPVTKSFNRGEC

SEQ ID NO: 1199 - protein, 447 aa, synthetic construct
  source 1..447: note = XENP39153 Chain 1 - 2G4[PD-L1]_H1.62_IgG1_pI(-)_Isosteric_A_/PVA_/S267K/L368D/K 370S
EVQLLESGGGLVQPGGSLRLSCAASGFTFSSYDMSWVRQAPGKGLEWVSTISSGGSFTHYPDSVKGRFTISRDNSKNTLYLQMNSLRAEDTAVYYCARRSGDWYFDVWGAGTTVTVSSASTKGPSVFPLAPSSKSTSGGTAALGCLVKDYFPEPVTVSWNSGALTSGVHTFPAVLQSSGLYSLSSVVTVPSSSLGTQTYICNVNHKPSDTKVDKKVEPKSCDKTHTCPPCPAPPVAGPSVFLFPPKPKDTLMISRTPEVTCVVVDVKHEDPEVKFNWYVDGVEVHNAKTKPREEEYNSTYRVVSVLTVLHQDWLNGKEYKCKVSNKALPAPIEKTISKAKGQPREPQVYTLPPSREEMTKNQVSLTCDVSGFYPSDIAVEWESDGQPENNYKTTPPVLDSDGSFFLYSKLTVDKSRWEQGDVFSCSVMHEALHNHYTQKSLSLSPGK

SEQ ID NO: 1200 - protein, 479 aa, synthetic construct; identical to SEQ ID NO: 1143
  source 1..479: note = XENP39153 Chain 2 - 1A7[CD28]_H1_L1.71_scFv(GKPGS)4_Fc(216)_IgG1_C220S/PVA_/S26 7K/S364K/E357Q

SEQ ID NO: 1201 - protein, 216 aa, synthetic construct
  source 1..216: note = XENP39153 Chain 3 - 2G4[PD-L1]_L1.63 Light Chain
EIVLTQSPGTLSLSPGERATLSCRASSSISSSNLHWYQQKPGQSPRLLIYGTSNLASGVPVRFSGSGSGTDYTLTISRLEPEDFAVYYCQQWSSYPLYTFGGGTKVEIKRTVAAPSVFIFPPSDEQLKSGTASVVCLLNNFYPREAKVQWKVDNALQSGNSQESVTEQDSKDSTYSLSSTLTLSKADYEKHKVYACEVTHQGLSSPVTKSFNRGEC

SEQ ID NO: 1202 - protein, 447 aa, synthetic construct; identical to SEQ ID NO: 1187
  source 1..447: note = XENP39363 Chain 1 - 2G4[PD-L1]_H1.4_IgG1_pI(-)_Isosteric_A_/PVA_/S267K/L368D/K3 70S

SEQ ID NO: 1203 - protein, 479 aa, synthetic construct; identical to SEQ ID NO: 1135
  source 1..479: note = XENP39363 Chain 2 - 1A7[CD28]_H1.14_L1.71_scFv(GKPGS)4_Fc(216)_IgG1_C220S/PVA_/ S267K/S364K/E357Q

SEQ ID NO: 1204 - protein, 216 aa, synthetic construct; identical to SEQ ID NO: 1159
  source 1..216: note = XENP39363 Chain 3 - 2G4[PD-L1]_L1.23

SEQ ID NO: 1205 - protein, 447 aa, synthetic construct; identical to SEQ ID NO: 1187
  source 1..447: note = XENP39364 Chain 1 - 2G4[PD-L1]_H1.4_IgG1_pI(-)_Isosteric_A_/PVA_/S267K/L368D/K3 70S

SEQ ID NO: 1206 - protein, 479 aa, synthetic construct; identical to SEQ ID NO: 1146
  source 1..479: note = XENP39364 Chain 2 - 1A7[CD28]_H1.1_L1.71_scFv(GKPGS)4_Fc(216)_IgG1_C220S/PVA_/S 267K/S364K/E357Q

SEQ ID NO: 1207 - protein, 216 aa, synthetic construct; identical to SEQ ID NO: 1159
  source 1..216: note = XENP39364 Chain 3 - 2G4[PD-L1]_L1.23

SEQ ID NO: 1208 - protein, 447 aa, synthetic construct; identical to SEQ ID NO: 1187
  source 1..447: note = XENP39365 Chain 1 - 2G4[PD-L1]_H1.4_IgG1_pI(-)_Isosteric_A_/PVA_/S267K/L368D/K3 70S

SEQ ID NO: 1209 - protein, 479 aa, synthetic construct; identical to SEQ ID NO: 1126
  source 1..479: note = XENP39365 Chain 2 - 1A7[CD28]_H1.14_L1_scFv(GKPGS)4_Fc(216)_IgG1_C220S/PVA_/S26 7K/S364K/E357Q

SEQ ID NO: 1210 - protein, 216 aa, synthetic construct; identical to SEQ ID NO: 1159
  source 1..216: note = XENP39365 Chain 3 - 2G4[PD-L1]_L1.23

SEQ ID NO: 1211 - protein, 447 aa, synthetic construct; identical to SEQ ID NO: 1187
  source 1..447: note = XENP39366 Chain 1 - 2G4[PD-L1]_H1.4_IgG1_pI(-)_Isosteric_A_/PVA_/S267K/L368D/K3 70S

SEQ ID NO: 1212 - protein, 479 aa, synthetic construct; identical to SEQ ID NO: 1135
  source 1..479: note = XENP39366 Chain 2 - 1A7[CD28]_H1.14_L1.71_scFv(GKPGS)4_Fc(216)_IgG1_C220S/PVA_/ S267K/S364K/E357Q

SEQ ID NO: 1213 - protein, 216 aa, synthetic construct; identical to SEQ ID NO: 1171
  source 1..216: note = XENP39366 Chain 3 - 2G4[PD-L1]_L1.24

SEQ ID NO: 1214 - protein, 447 aa, synthetic construct; identical to SEQ ID NO: 1187
  source 1..447: note = XENP39367 Chain 1 - 2G4[PD-L1]_H1.4_IgG1_pI(-)_Isosteric_A_/PVA_/S267K/L368D/K3 70S

SEQ ID NO: 1215 - protein, 479 aa, synthetic construct; identical to SEQ ID NO: 1146
  source 1..479: note = XENP39367 Chain 2 - 1A7[CD28]_H1.1_L1.71_scFv(GKPGS)4_Fc(216)_IgG1_C220S/PVA_/S 267K/S364K/E357Q

SEQ ID NO: 1216 - protein, 216 aa, synthetic construct; identical to SEQ ID NO: 1171
  source 1..216: note = XENP39367 Chain 3 - 2G4[PD-L1]_L1.24

SEQ ID NO: 1217 - protein, 447 aa, synthetic construct; identical to SEQ ID NO: 1187
  source 1..447: note = XENP39368 Chain 1 - 2G4[PD-L1]_H1.4_IgG1_pI(-)_Isosteric_A_/PVA_/S267K/L368D/K3 70S

SEQ ID NO: 1218 - protein, 479 aa, synthetic construct; identical to SEQ ID NO: 1126
  source 1..479: note = XENP39368 Chain 2 - 1A7[CD28]_H1.14_L1_scFv(GKPGS)4_Fc(216)_IgG1_C220S/PVA_/S26 7K/S364K/E357Q

SEQ ID NO: 1219 - protein, 216 aa, synthetic construct; identical to SEQ ID NO: 1171
  source 1..216: note = XENP39368 Chain 3 - 2G4[PD-L1]_L1.24

SEQ ID NO: 1220 - protein, 447 aa, synthetic construct
  source 1..447: note = XENP39733 Chain 1 - 2G4[PD-L1]_H1.12_IgG1_pI(-)_Isosteric_A_/PVA_/S267K/L368D/K 370S/M428L/N434S
EVQLLESGGGLVQPGGSLRLSCAASGFTFSVYDMSWVRQAPGKRLEWVSTISSGGSFTHYPDSVKGRFTISRDNSKNTLYLQMNSLRAEDTAVYYCVRRSLDWYFDVWGAGTTVTVSSASTKGPSVFPLAPSSKSTSGGTAALGCLVKDYFPEPVTVSWNSGALTSGVHTFPAVLQSSGLYSLSSVVTVPSSSLGTQTYICNVNHKPSDTKVDKKVEPKSCDKTHTCPPCPAPPVAGPSVFLFPPKPKDTLMISRTPEVTCVVVDVKHEDPEVKFNWYVDGVEVHNAKTKPREEEYNSTYRVVSVLTVLHQDWLNGKEYKCKVSNKALPAPIEKTISKAKGQPREPQVYTLPPSREEMTKNQVSLTCDVSGFYPSDIAVEWESDGQPENNYKTTPPVLDSDGSFFLYSKLTVDKSRWEQGDVFSCSVLHEALHSHYTQKSLSLSPGK

SEQ ID NO: 1221 - protein, 479 aa, synthetic construct; identical to SEQ ID NO: 1138
  source 1..479: note = XENP39733 Chain 2 - 1A7[CD28]_H1.14_L1.71_scFv(GKPGS)4_Fc(216)_IgG1_C220S/PVA_/ S267K/S364K/E357Q/M428L/N434S

SEQ ID NO: 1222 - protein, 447 aa, synthetic construct; identical to SEQ ID NO: 1169
  source 1..447: note = XENP40036 Chain 1 - 2G4[PD-L1]_H1.12_IgG1_pI(-)_Isosteric_A_/PVA_/S267K/L368D/K 370S

SEQ ID NO: 1223 - protein, 479 aa, synthetic construct; identical to SEQ ID NO: 1135
  source 1..479: note = XENP40036 Chain 2 - 1A7[CD28]_H1.14_L1.71_scFv(GKPGS)4_Fc(216)_IgG1_C220S/PVA_/ S267K/S364K/E357Q

SEQ ID NO: 1224 - protein, 216 aa, synthetic construct; identical to SEQ ID NO: 1171
  source 1..216: note = XENP40036 Chain 3 - 2G4[PD-L1]_L1.24 Light Chain

SEQ ID NO: 1225 - protein, 447 aa, synthetic construct; identical to SEQ ID NO: 1169
  source 1..447: note = XENP40403 Chain 1 - 2G4[PD-L1]_H1.12_IgG1_pI(-)_Isosteric_A_/PVA_/S267K/L368D/K 370S

SEQ ID NO: 1226 - protein, 479 aa, synthetic construct; identical to SEQ ID NO: 1135
  source 1..479: note = XENP40403 Chain 2 - 1A7[CD28]_H1.14_L1.71_scFv(GKPGS)4_Fc(216)_IgG1_C220S/PVA_/ S267K/S364K/E357Q

SEQ ID NO: 1227 - protein, 216 aa, synthetic construct
  source 1..216: note = XENP40403 Chain 3 - 2G4[PD-L1]_L1.66 Light Chain
EIVLTQSPGTLSLSPGERATLSCRVSSSIQSTNLHWYQQKPGQSPRPLIYGTSNLATGVPVRFSGSGSGTDYTLTISRLEPEDFAVYYCQQWSSYPLYTFGGGTKVEIKRTVAAPSVFIFPPSDEQLKSGTASVVCLLNNFYPREAKVQWKVDNALQSGNSQESVTEQDSKDSTYSLSSTLTLSKADYEKHKVYACEVTHQGLSSPVTKSFNRGEC

SEQ ID NO: 1228 - protein, 447 aa, synthetic construct; identical to SEQ ID NO: 1169
  source 1..447: note = XENP40405 Chain 1 - 2G4[PD-L1]_H1.12_IgG1_pI(-)_Isosteric_A_/PVA_/S267K/L368D/K 370S

SEQ ID NO: 1229 - protein, 479 aa, synthetic construct; identical to SEQ ID NO: 1135
  source 1..479: note = XENP40405 Chain 2 - 1A7[CD28]_H1.14_L1.71_scFv(GKPGS)4_Fc(216)_IgG1_C220S/PVA_/ S267K/S364K/E357Q

SEQ ID NO: 1230 - protein, 216 aa, synthetic construct
  source 1..216: note = XENP40405 Chain 3 - 2G4[PD-L1]_L1.68 Light Chain
EIVLTQSPGTLSLSPGERATLSCRVSSSIQSTNLHWYQQKPGQSPRPLIYGTSNLASGVPVRFSGSGSGTDYTLTISRLEPEDFAVYYCQQWSSYPLYTFGGGTKVEIKRTVAAPSVFIFPPSDEQLKSGTASVVCLLNNFYPREAKVQWKVDNALQSGNSQESVTEQDSKDSTYSLSSTLTLSKADYEKHKVYACEVTHQGLSSPVTKSFNRGEC

SEQ ID NO: 1231 - protein, 447 aa, synthetic construct; identical to SEQ ID NO: 1169
  source 1..447: note = XENP40409 Chain 1 - 2G4[PD-L1]_H1.12_IgG1_pI(-)_Isosteric_A_/PVA_/S267K/L368D/K 370S

SEQ ID NO: 1232 - protein, 479 aa, synthetic construct; identical to SEQ ID NO: 1135
  source 1..479: note = XENP40409 Chain 2 - 1A7[CD28]_H1.14_L1.71_scFv(GKPGS)4_Fc(216)_IgG1_C220S/PVA_/ S267K/S364K/E357Q

SEQ ID NO: 1233 - protein, 216 aa, synthetic construct
  source 1..216: note = XENP40409 Chain 3 - 2G4[PD-L1]_L1.14 Light Chain
EIVLTQSPGTLSLSPGERATLSCRVSSSIQSSNLHWYQQKPGQSPRPLIYGTSNLASGVPVRFSGSGSGTDYTLTISRLEPEDFAVYYCQQWSSYPLYTFGGGTKVEIKRTVAAPSVFIFPPSDEQLKSGTASVVCLLNNFYPREAKVQWKVDNALQSGNSQESVTEQDSKDSTYSLSSTLTLSKADYEKHKVYACEVTHQGLSSPVTKSFNRGEC

SEQ ID NO: 1234 - protein, 447 aa, synthetic construct; identical to SEQ ID NO: 1220
  source 1..447: note = XENP40706 Chain 1 - 2G4[PD-L1]_H1.12_IgG1_pI(-)_Isosteric_A_/PVA_/S267K/L368D/K 370S/M428L/N434S

SEQ ID NO: 1235 - protein, 479 aa, synthetic construct; identical to SEQ ID NO: 1138
  source 1..479: note = XENP40706 Chain 2 - 1A7[CD28]_H1.14_L1.71_scFv(GKPGS)4_Fc(216)_IgG1_C220S/PVA_/ S267K/S364K/E357Q/M428L/N434S

SEQ ID NO: 1236 - protein, 216 aa, synthetic construct; identical to SEQ ID NO: 1233
  source 1..216: note = XENP40706 Chain 3 - 2G4[PD-L1]_L1.14 Light Chain

SEQ ID NO: 1237 - protein, 449 aa, synthetic construct; identical to SEQ ID NO: 1125
  source 1..449: note = XENP34961 Chain 1 - avelumab[PD-L1]_H1_IgG1_pI(-)_Isosteric_A_/PVA_/S267K/L368D /K370S-Fc(222)_IgG1_PVA_/S267K/S364K/E357Q

SEQ ID NO: 1238 - protein, 716 aa, synthetic construct
  source 1..716: note = XENP34961 Chain 2 - avelumab[PD-L1]_H1_(G4S)2_1A7[CD28]_H1.14_L1_scFv(GKPGS)4_( G4S)2_Fc(222)_IgG1_PVA_/S267K/S364K/E357Q
EVQLLESGGGLVQPGGSLRLSCAASGFTFSSYIMMWVRQAPGKGLEWVSSIYPSGGITFYADTVKGRFTISRDNSKNTLYLQMNSLRAEDTAVYYCARIKLGTVTTVDYWGQGTLVTVSSASTKGPSVFPLAPSSKSTSGGTAALGCLVKDYFPEPVTVSWNSGALTSGVHTFPAVLQSSGLYSLSSVVTVPSSSLGTQTYICNVNHKPSNTKVDKKVEPKSCGGGGSGGGGSEVQLLESGGGLVQPGGSLRLSCAASGFTFSSYYMSWVRQAPGKGLEWVSTISESGDSTYYADSVKGRFTISRDNSKNTLYLQMNSLRAEDTAVYYCAKSGPGLRQVGFDYWGQGTLVTVSSGKPGSGKPGSGKPGSGKPGSDIQMTQSPSSLSASVGDRVTITCRASQSISSYLNWYQQKPGKAPKLLIYAASSLQSGVPSRFSGSGSGTDFTLTISSLQPEDFATYYCQQSYSTPFTFGQGTKLEIKGGGGSGGGGSKTHTCPPCPAPPVAGPSVFLFPPKPKDTLMISRTPEVTCVVVDVKHEDPEVKFNWYVDGVEVHNAKTKPREEQYNSTYRVVSVLTVLHQDWLNGKEYKCKVSNKALPAPIEKTISKAKGQPREPQVYTLPPSREQMTKNQVKLTCLVKGFYPSDIAVEWESNGQPENNYKTTPPVLDSDGSFFLYSKLTVDKSRWQQGNVFSCSVMHEALHNHYTQKSLSLSPGK

SEQ ID NO: 1239 - protein, 216 aa, synthetic construct; identical to SEQ ID NO: 1127
  source 1..216: note = XENP34961 Chain 3 - avelumab[PD-L1]_L1 Light Chain

SEQ ID NO: 1240 - protein, 447 aa, synthetic construct; identical to SEQ ID NO: 1018
  source 1..447: note = XENP36154 Chain 1 - 2G4[PD-L1]_H1_IgG1_pI(-)_Isosteric_A_/PVA_/S267K/L368D/K370 S

SEQ ID NO: 1241 - protein, 714 aa, synthetic construct
  source 1..714: note = XENP36154 Chain 2 - 2G4[PD-L1]_H1_(G4S)2_1A7[CD28]_H1.14_L1_scFv(GKPGS)4_(G4S)2 _Fc(222)_IgG1_PVA_/S267K/S364K/E357Q
EVQLLESGGGLVQPGGSLRLSCAASGFTFSSYDMSWVRQAPGKRLEWVSTISSGGSFTHYPDSVKGRFTISRDNSKNTLYLQMNSLRAEDTAVYYCVRRSGDWYFDVWGAGTTVTVSSASTKGPSVFPLAPSSKSTSGGTAALGCLVKDYFPEPVTVSWNSGALTSGVHTFPAVLQSSGLYSLSSVVTVPSSSLGTQTYICNVNHKPSNTKVDKKVEPKSCGGGGSGGGGSEVQLLESGGGLVQPGGSLRLSCAASGFTFSSYYMSWVRQAPGKGLEWVSTISESGDSTYYADSVKGRFTISRDNSKNTLYLQMNSLRAEDTAVYYCAKSGPGLRQVGFDYWGQGTLVTVSSGKPGSGKPGSGKPGSGKPGSDIQMTQSPSSLSASVGDRVTITCRASQSISSYLNWYQQKPGKAPKLLIYAASSLQSGVPSRFSGSGSGTDFTLTISSLQPEDFATYYCQQSYSTPFTFGQGTKLEIKGGGGSGGGGSKTHTCPPCPAPPVAGPSVFLFPPKPKDTLMISRTPEVTCVVVDVKHEDPEVKFNWYVDGVEVHNAKTKPREEQYNSTYRVVSVLTVLHQDWLNGKEYKCKVSNKALPAPIEKTISKAKGQPREPQVYTLPPSREQMTKNQVKLTCLVKGFYPSDIAVEWESNGQPENNYKTTPPVLDSDGSFFLYSKLTVDKSRWQQGNVFSCSVMHEALHNHYTQKSLSLSPGK

SEQ ID NO: 1242 - protein, 216 aa, synthetic construct; identical to SEQ ID NO: 1017
  source 1..216: note = XENP36154 Chain 3 - 2G4[PD-L1]_L1 Light Chain

SEQ ID NO: 1243 - protein, 447 aa, synthetic construct; identical to SEQ ID NO: 1131
  source 1..447: note = XENP36803 Chain 1 - 2G4[PD-L1]_H1_IgG1_pI(-)_Isosteric_A_/PVA_/S267K/L368D/K370 S/M428L/N434S

SEQ ID NO: 1244 - protein, 709 aa, synthetic construct
  source 1..709: note = XENP36803 Chain 2 - 2G4[PD-L1]_H1_IgG1_PVA_/S267K/S364K/E357Q/M428L/N434S/K447d el_(G4S)3_1A7[CD28]_H1.14_L1_scFv(GKPGS)4
EVQLLESGGGLVQPGGSLRLSCAASGFTFSSYDMSWVRQAPGKRLEWVSTISSGGSFTHYPDSVKGRFTISRDNSKNTLYLQMNSLRAEDTAVYYCVRRSGDWYFDVWGAGTTVTVSSASTKGPSVFPLAPSSKSTSGGTAALGCLVKDYFPEPVTVSWNSGALTSGVHTFPAVLQSSGLYSLSSVVTVPSSSLGTQTYICNVNHKPSNTKVDKKVEPKSCDKTHTCPPCPAPPVAGPSVFLFPPKPKDTLMISRTPEVTCVVVDVKHEDPEVKFNWYVDGVEVHNAKTKPREEQYNSTYRVVSVLTVLHQDWLNGKEYKCKVSNKALPAPIEKTISKAKGQPREPQVYTLPPSREQMTKNQVKLTCLVKGFYPSDIAVEWESNGQPENNYKTTPPVLDSDGSFFLYSKLTVDKSRWQQGNVFSCSVLHEALHSHYTQKSLSLSPGGGGGSGGGGSGGGGSEVQLLESGGGLVQPGGSLRLSCAASGFTFSSYYMSWVRQAPGKGLEWVSTISESGDSTYYADSVKGRFTISRDNSKNTLYLQMNSLRAEDTAVYYCAKSGPGLRQVGFDYWGQGTLVTVSSGKPGSGKPGSGKPGSGKPGSDIQMTQSPSSLSASVGDRVTITCRASQSISSYLNWYQQKPGKAPKLLIYAASSLQSGVPSRFSGSGSGTDFTLTISSLQPEDFATYYCQQSYSTPFTFGQGTKLEIK

SEQ ID NO: 1245 - protein, 216 aa, synthetic construct; identical to SEQ ID NO: 1017
  source 1..216: note = XENP36803 Chain 3 - 2G4[PD-L1]_L1 Light Chain

SEQ ID NO: 1246 - protein, 449 aa, synthetic construct
  source 1..449: note = XENP24118 Heavy Chain - avelumab[PD-L1]_H1
EVQLLESGGGLVQPGGSLRLSCAASGFTFSSYIMMWVRQAPGKGLEWVSSIYPSGGITFYADTVKGRFTISRDNSKNTLYLQMNSLRAEDTAVYYCARIKLGTVTTVDYWGQGTLVTVSSASTKGPSVFPLAPSSKSTSGGTAALGCLVKDYFPEPVTVSWNSGALTSGVHTFPAVLQSSGLYSLSSVVTVPSSSLGTQTYICNVNHKPSNTKVDKKVEPKSCDKTHTCPPCPAPPVAGPSVFLFPPKPKDTLMISRTPEVTCVVVDVKHEDPEVKFNWYVDGVEVHNAKTKPREEQYNSTYRVVSVLTVLHQDWLNGKEYKCKVSNKALPAPIEKTISKAKGQPREPQVYTLPPSREEMTKNQVSLTCLVKGFYPSDIAVEWESNGQPENNYKTTPPVLDSDGSFFLYSKLTVDKSRWQQGNVFSCSVMHEALHNHYTQKSLSLSPGK

SEQ ID NO: 1247 - protein, 216 aa, synthetic construct; identical to SEQ ID NO: 1127
  source 1..216: note = XENP24118 Light Chain - avelumab[PD-L1]_L1

SEQ ID NO: 1248 - protein, 444 aa, synthetic construct
  source 1..444: note = XENP31602 Chain 1 - PSMA-H_H1_IgG1_pI(-)_Isosteric_A_/PVA_/S267K/L368D/K370S
EVQLVQSGAEVKKPGASVKVSCKTSGYTFTEYTIHWVRQAPGQSLEWMGNINPNNGGTTYNQKFQGRVTITVDKSTSTAYMELSSLRSEDTAVYYCAAGWNFDYWGQGTLVTVSSASTKGPSVFPLAPSSKSTSGGTAALGCLVKDYFPEPVTVSWNSGALTSGVHTFPAVLQSSGLYSLSSVVTVPSSSLGTQTYICNVNHKPSDTKVDKKVEPKSCDKTHTCPPCPAPPVAGPSVFLFPPKPKDTLMISRTPEVTCVVVDVKHEDPEVKFNWYVDGVEVHNAKTKPREEEYNSTYRVVSVLTVLHQDWLNGKEYKCKVSNKALPAPIEKTISKAKGQPREPQVYTLPPSREEMTKNQVSLTCDVSGFYPSDIAVEWESDGQPENNYKTTPPVLDSDGSFFLYSKLTVDKSRWEQGDVFSCSVMHEALHNHYTQKSLSLSPGK

SEQ ID NO: 1249 - protein, 717 aa, synthetic construct
  source 1..717: note = XENP31602 Chain 2 - PSMA-H_H1_CH1_(G4S)2_[CD3]_H1.30_L1.47_scFv(GKPGS)4_(G4S)2_ Fc(222)_IgG1_PVA_/S267K/S364K/E357Q
EVQLVQSGAEVKKPGASVKVSCKTSGYTFTEYTIHWVRQAPGQSLEWMGNINPNNGGTTYNQKFQGRVTITVDKSTSTAYMELSSLRSEDTAVYYCAAGWNFDYWGQGTLVTVSSASTKGPSVFPLAPSSKSTSGGTAALGCLVKDYFPEPVTVSWNSGALTSGVHTFPAVLQSSGLYSLSSVVTVPSSSLGTQTYICNVNHKPSNTKVDKKVEPKSCGGGGSGGGGSEVQLVESGGGLVQPGGSLRLSCAASGFTFSTYAMNWVRQAPGKGLEWVGRIRSKYNNYATYYADSVKGRFTISRDDSKNTLYLQMNSLRAEDTAVYYCVRHGNFGDSYVSWFAYWGQGTLVTVSSGKPGSGKPGSGKPGSGKPGSQAVVTQEPSLTVSPGGTVTLTCGSSTGAVTTSNYANWVQQKPGKSPRGLIGGTNKRAPGVPARFSGSLLGGKAALTISGAQPEDEADYYCALWYSNHWVFGGGTKLTVLGGGGSGGGGSKTHTCPPCPAPPVAGPSVFLFPPKPKDTLMISRTPEVTCVVVDVKHEDPEVKFNWYVDGVEVHNAKTKPREEQYNSTYRVVSVLTVLHQDWLNGKEYKCKVSNKALPAPIEKTISKAKGQPREPQVYTLPPSREQMTKNQVKLTCLVKGFYPSDIAVEWESNGQPENNYKTTPPVLDSDGSFFLYSKLTVDKSRWQQGNVFSCSVMHEALHNHYTQKSLSLSPGK

SEQ ID NO: 1250 - protein, 214 aa, synthetic construct
  source 1..214: note = XENP31602 Chain 3 - PSMA-H_L1 Light Chain
DIVMTQSPDSLAVSLGERATLSCRASQDVGTAVDWYQQKPDQSPKLLIYWASTRHTGVPDRFTGSGSGTDFTLTISSLQAEDVAVYFCQQYNSYPLTFGAGTKVEIKRTVAAPSVFIFPPSDEQLKSGTASVVCLLNNFYPREAKVQWKVDNALQSGNSQESVTEQDSKDSTYSLSSTLTLSKADYEKHKVYACEVTHQGLSSPVTKSFNRGEC

SEQ ID NO: 1251 - protein, 444 aa, synthetic construct; identical to SEQ ID NO: 1248
  source 1..444: note = XENP32220 Chain 1 - PSMA-H_H1_IgG1_pI(-)_Isosteric_A_/PVA_/S267K/L368D/K370S

SEQ ID NO: 1252 - protein, 717 aa, synthetic construct
  source 1..717: note = XENP32220 Chain 2 - PSMA-H_H1_(G4S)_[CD3]_L1.47_H1.32_scFv(GKPGS)4_Fc(222)_IgG1 _C220S/PVA_/S267K/S364K/E357Q
EVQLVQSGAEVKKPGASVKVSCKTSGYTFTEYTIHWVRQAPGQSLEWMGNINPNNGGTTYNQKFQGRVTITVDKSTSTAYMELSSLRSEDTAVYYCAAGWNFDYWGQGTLVTVSSASTKGPSVFPLAPSSKSTSGGTAALGCLVKDYFPEPVTVSWNSGALTSGVHTFPAVLQSSGLYSLSSVVTVPSSSLGTQTYICNVNHKPSNTKVDKKVEPKSCGGGGSGGGGSQAVVTQEPSLTVSPGGTVTLTCGSSTGAVTTSNYANWVQQKPGKSPRGLIGGTNKRAPGVPARFSGSLLGGKAALTISGAQPEDEADYYCALWYSNHWVFGGGTKLTVLGKPGSGKPGSGKPGSGKPGSEVQLVESGGGLVQPGGSLRLSCAASGFTFSTYAMNWVRQAPGKGLEWVGRIRSKANNYATYYADSVKGRFTISRDDSKNTLYLQMNSLRAEDTAVYYCVRHGNFGDSYVSWFAYWGQGTLVTVSSGGGGSGGGGSKTHTCPPCPAPPVAGPSVFLFPPKPKDTLMISRTPEVTCVVVDVKHEDPEVKFNWYVDGVEVHNAKTKPREEQYNSTYRVVSVLTVLHQDWLNGKEYKCKVSNKALPAPIEKTISKAKGQPREPQVYTLPPSREQMTKNQVKLTCLVKGFYPSDIAVEWESNGQPENNYKTTPPVLDSDGSFFLYSKLTVDKSRWQQGNVFSCSVMHEALHNHYTQKSLSLSPGK

SEQ ID NO: 1253 - protein, 214 aa, synthetic construct
  source 1..214: note = XENP32220 Chain 3 - PSMA-H_L1.24 Light Chain
DIVMTQSPDSLAVSLGERATLSCRASQDVGTAVDWYQQKPDQSPKLLIYYASTRHTGVPDRFTGSGSGTDFTLTISSLQAEDVAVYFCQQYNSYPLTFGAGTKVEIKRTVAAPSVFIFPPSDEQLKSGTASVVCLLNNFYPREAKVQWKVDNALQSGNSQESVTEQDSKDSTYSLSSTLTLSKADYEKHKVYACEVTHQGLSSPVTKSFNRGEC

SEQ ID NO: 1254 - protein, 19 aa, synthetic construct
GGGGSGGGGSKTHTCPPCP

SEQ ID NO: 1255 - protein, 5 aa, synthetic construct
GSGGS

SEQ ID NO: 1256 - protein, 5 aa, synthetic construct
GGGGS

SEQ ID NO: 1257 - protein, 4 aa, synthetic construct
GGGS

SEQ ID NO: 1258 - protein, 134 aa, Macaca fascicularis; identical to SEQ ID NO: 14
  source 1..134: note = tr|Q0PDN3|19-152

SEQ ID NO: 1259 - protein, 15 aa, synthetic construct
GGGGSGGGGSGGGGS

SEQ ID NO: 1260 - protein, 18 aa, synthetic construct
GSTSGSGKPGSGEGSTKG

SEQ ID NO: 1261 - protein, 14 aa, synthetic construct
IRPRAIGGSKPRVA

SEQ ID NO: 1262 - protein, 15 aa, synthetic construct
GKGGSGKGGSGKGGS

SEQ ID NO: 1263 - protein, 15 aa, synthetic construct
GGKGSGGKGSGGKGS

SEQ ID NO: 1264 - protein, 15 aa, synthetic construct
GGGKSGGGKSGGGKS

SEQ ID NO: 1265 - protein, 15 aa, synthetic construct
GKGKSGKGKSGKGKS

SEQ ID NO: 1266 - protein, 15 aa, synthetic construct
GGGKSGGKGSGKGGS

SEQ ID NO: 1267 - protein, 15 aa, synthetic construct
GKPGSGKPGSGKPGS

SEQ ID NO: 1268 - protein, 20 aa, synthetic construct
GKGKSGKGKSGKGKSGKGKS

SEQ ID NO: 1269 - protein, 20 aa, synthetic construct
GGGGSGGGGSGGGGSGGGGS

SEQ ID NO: 1270 - protein, 14 aa, synthetic construct
STAGDTHLGGEDFD

SEQ ID NO: 1271 - protein, 15 aa, synthetic construct
GEGGSGEGGSGEGGS

SEQ ID NO: 1272 - protein, 15 aa, synthetic construct
GGEGSGGEGSGGEGS

SEQ ID NO: 1273 - protein, 15 aa, synthetic construct
GGGESGGGESGGGES

SEQ ID NO: 1274 - protein, 15 aa, synthetic construct
GEGESGEGESGEGES

SEQ ID NO: 1275 - protein, 15 aa, synthetic construct
GGGESGGEGSGEGGS

SEQ ID NO: 1276 - protein, 20 aa, synthetic construct
GEGESGEGESGEGESGEGES

SEQ ID NO: 1277 - protein, 19 aa, synthetic construct
PRGASKSGSASQTGSAPGS

SEQ ID NO: 1278 - protein, 19 aa, synthetic construct
GTAAAGAGAAGGAAAGAAG

SEQ ID NO: 1279 - protein, 19 aa, synthetic construct
GTSGSSGSGSGGSGSGGGG

SEQ ID NO: 1280 - protein, 5 aa, synthetic construct
GGGGS

SEQ ID NO: 1281 - protein, 10 aa, synthetic construct
GGGGSGGGGS

SEQ ID NO: 1282 - protein, 25 aa, synthetic construct
GGGGSGGGGSGGGGSGGGGSGGGGS

SEQ ID NO: 1283 - protein, 30 aa, synthetic construct
GGGGSGGGGSGGGGSGGGGSGGGGSGGGGS

SEQ ID NO: 1284 - protein, 35 aa, synthetic construct
GGGGSGGGGSGGGGSGGGGSGGGGSGGGGSGGGGS

SEQ ID NO: 1285 - protein, 5 aa, synthetic construct
GGGGA

SEQ ID NO: 1286 - protein, 10 aa, synthetic construct
GGGGAGGGGA

SEQ ID NO: 1287 - protein, 15 aa, synthetic construct
GGGGAGGGGAGGGGA

SEQ ID NO: 1288 - protein, 20 aa, synthetic construct
GGGGAGGGGAGGGGAGGGGA

SEQ ID NO: 1289 - protein, 25 aa, synthetic construct
GGGGAGGGGAGGGGAGGGGAGGGGA

SEQ ID NO: 1290 - protein, 30 aa, synthetic construct
GGGGAGGGGAGGGGAGGGGAGGGGAGGGGA

SEQ ID NO: 1291 - protein, 35 aa, synthetic construct
GGGGAGGGGAGGGGAGGGGAGGGGAGGGGAGGGGA

SEQ ID NO: 1292 - protein, 30 aa, synthetic construct
DPALVHQRPAPPGGGGSGGGGSGGGGSGGG

SEQ ID NO: 1293 - protein, 5 aa, synthetic construct
GKPGS

SEQ ID NO: 1294 - protein, 25 aa, synthetic construct
GKPGSGKPGSGKPGSGKPGSGKPGS

SEQ ID NO: 1295 - protein, 30 aa, synthetic construct
GKPGSGKPGSGKPGSGKPGSGKPGSGKPGS

SEQ ID NO: 1296 - protein, 5 aa, synthetic construct
GGGES

SEQ ID NO: 1297 - protein, 9 aa, synthetic construct
KTHTCPPCP

SEQ ID NO: 1298 - protein, 15 aa, synthetic construct
EPKSSDKTHTCPPCP

SEQ ID NO: 1299 - protein, 19 aa, synthetic construct
GKPGSGKPGSKTHTCPPCP

SEQ ID NO: 1300 - protein, 14 aa, synthetic construct
GKPGSKTHTCPPCP

SEQ ID NO: 1301 - protein, 5 aa, synthetic construct
EPKSC

SEQ ID NO: 1302 - protein, 15 aa, synthetic construct
EPKSCGGGGSGGGGS

SEQ ID NO: 1303 - protein, 10 aa, synthetic construct
EPKSCGKPGS

SEQ ID NO: 1304 - protein, 216 aa, synthetic construct
  source 1..216: note = Heterodimeric Fc Backbone 1 monomer 1 (-)
APPVAGPSVFLFPPKPKDTLMISRTPEVTCVVVDVKHEDPEVKFNWYVDGVEVHNAKTKPREEEYNSTYRVVSVLTVLHQDWLNGKEYKCKVSNKALPAPIEKTISKAKGQPREPQVYTLPPSREEMTKNQVSLTCDVSGFYPSDIAVEWESDGQPENNYKTTPPVLDSDGSFFLYSKLTVDKSRWEQGDVFSCSVMHEALHNHYTQKSLSLSPGK

SEQ ID NO: 1305 - protein, 216 aa, synthetic construct
  source 1..216: note = Heterodimeric Fc Backbone 1 monomer 2 (+)
APPVAGPSVFLFPPKPKDTLMISRTPEVTCVVVDVKHEDPEVKFNWYVDGVEVHNAKTKPREEQYNSTYRVVSVLTVLHQDWLNGKEYKCKVSNKALPAPIEKTISKAKGQPREPQVYTLPPSREQMTKNQVKLTCLVKGFYPSDIAVEWESNGQPENNYKTTPPVLDSDGSFFLYSKLTVDKSRWQQGNVFSCSVMHEALHNHYTQKSLSLSPGK

SEQ ID NO: 1306 - protein, 216 aa, synthetic construct; identical to SEQ ID NO: 1304
  source 1..216: note = Heterodimeric Fc Backbone 2 monomer 1 (-)

SEQ ID NO: 1307 - protein, 216 aa, synthetic construct
  source 1..216: note = Heterodimeric Fc Backbone monomer 2 (+)
APPVAGPSVFLFPPKPKDTLMISRTPEVTCVVVDVKHEDPEVKFNWYVDGVEVHNAKTKPREEQYNSTYRVVSVLTVLHQDWLNGKEYKCKVSNKALPAPIEKTISKAKGQPREPQVYTLPPSREEMTKNQVKLTCLVKGFYPSDIAVEWESNGQPENNYKTTPPVLDSDGSFFLYSKLTVDKSRWQQGNVFSCSVMHEALHNHYTQKSLSLSPGK

SEQ ID NO: 1308 - protein, 216 aa, synthetic construct
  source 1..216: note = Heterodimeric Fc Backbone 3 monomer 1 (-)
APPVAGPSVFLFPPKPKDTLMISRTPEVTCVVVDVKHEDPEVKFNWYVDGVEVHNAKTKPREEEYNSTYRVVSVLTVLHQDWLNGKEYKCKVSNKALPAPIEKTISKAKGQPREPQVYTLPPSREEMTKNQVSLTCEVSGFYPSDIAVEWESDGQPENNYKTTPPVLDSDGSFFLYSKLTVDKSRWEQGDVFSCSVMHEALHNHYTQKSLSLSPGK

SEQ ID NO: 1309 - protein, 216 aa, synthetic construct; identical to SEQ ID NO: 1307
  source 1..216: note = Heterodimeric Fc Backbone 3 monomer 2 (+)

SEQ ID NO: 1310 - protein, 216 aa, synthetic construct
  source 1..216: note = Heterodimeric Fc Backbone 4 monomer 1 (-)
APPVAGPSVFLFPPKPKDTLMISRTPEVTCVVVDVKHEDPEVKFNWYVDGVEVHNAKTKPREEEYNSTYRVVSVLTVLHQDWLNGKEYKCKVSNKALPAPIEKTISKAKGQPREPQVYTLPPSREEMTENEVSLTCLVKGFYPSDIAVEWESDGQPENNYKTTPPVLDSDGSFFLYSKLEVDKSRWEQGDVFSCSVMHEALHNHYTQKSLSLSPGK

SEQ ID NO: 1311 - protein, 216 aa, synthetic construct
  source 1..216: note = Heterodimeric Fc Backbone 4 monomer 2 (+)
APPVAGPSVFLFPPKPKDTLMISRTPEVTCVVVDVKHEDPEVKFNWYVDGVEVHNAKTKPREEQYNSTYRVVSVLTVLHQDWLNGKEYKCKVSNKALPAPIEKTISKAKGQPREPQVYTLPPSREEMTKNQVSLTCLVKGFYPSDIAVEWESNGQPENNYKTTPPVLDSKGSFFLYSKLTVDKSRWQQGNVFSCSVMHEALHNHYTQKSLSLSPGK

SEQ ID NO: 1312 - protein, 216 aa, synthetic construct
  source 1..216: note = Heterodimeric Fc Backbone 5 monomer 1 (-)
APPVAGPSVFLFPPKPKDTLMISRTPEVTCVVVDVKHEDPEVKFNWYVDGVEVHNAKTKPREEEYNSTYRVVSVLTVLHQDWLNGKEYKCKVSNKALPAPIEKTISKAKGQPREPQVYTLPPSRDELTKNQVSLTCDVSGFYPSDIAVEWESDGQPENNYKTTPPVLDSDGSFFLYSKLTVDKSRWEQGDVFSCSVMHEALHNHYTQKSLSLSPGK

SEQ ID NO: 1313 - protein, 216 aa, synthetic construct
  source 1..216: note = Heterodimeric Fc Backbone 5 monomer 2 (+)
APPVAGPSVFLFPPKPKDTLMISRTPEVTCVVVDVKHEDPEVKFNWYVDGVEVHNAKTKPREEQYNSTYRVVSVLTVLHQDWLNGKEYKCKVSNKALPAPIEKTISKAKGQPREPQVYTLPPSRDQLTKNQVKLTCLVKGFYPSDIAVEWESNGQPENNYKTTPPVLDSDGSFFLYSKLTVDKSRWQQGNVFSCSVMHEALHNHYTQKSLSLSPGK

SEQ ID NO: 1314 - protein, 216 aa, synthetic construct
  source 1..216: note = Heterodimeric Fc Backbone 6 monomer 1 (-)
APPVAGPSVFLFPPKPKDTLMISRTPEVTCVVVDVKHEDPEVKFNWYVDGVEVHNAKTKPREEEYASTYRVVSVLTVLHQDWLNGKEYKCKVSNKALPAPIEKTISKAKGQPREPQVYTLPPSREEMTKNQVSLTCDVSGFYPSDIAVEWESDGQPENNYKTTPPVLDSDGSFFLYSKLTVDKSRWEQGDVFSCSVMHEALHNHYTQKSLSLSPGK

SEQ ID NO: 1315 - protein, 216 aa, synthetic construct
  source 1..216: note = Heterodimeric Fc Backbone 6 monomer 2 (+)
APPVAGPSVFLFPPKPKDTLMISRTPEVTCVVVDVKHEDPEVKFNWYVDGVEVHNAKTKPREEQYASTYRVVSVLTVLHQDWLNGKEYKCKVSNKALPAPIEKTISKAKGQPREPQVYTLPPSREQMTKNQVKLTCLVKGFYPSDIAVEWESNGQPENNYKTTPPVLDSDGSFFLYSKLTVDKSRWQQGNVFSCSVMHEALHNHYTQKSLSLSPGK

SEQ ID NO: 1316 - protein, 216 aa, synthetic construct
  source 1..216: note = Heterodimeric Fc Backbone 7 monomer 1 (-)
APPVAGPSVFLFPPKPKDTLMISRTPEVTCVVVDVKHEDPEVKFNWYVDGVEVHNAKTKPREEEYSSTYRVVSVLTVLHQDWLNGKEYKCKVSNKALPAPIEKTISKAKGQPREPQVYTLPPSREEMTKNQVSLTCDVSGFYPSDIAVEWESDGQPENNYKTTPPVLDSDGSFFLYSKLTVDKSRWEQGDVFSCSVMHEALHNHYTQKSLSLSPGK

SEQ ID NO: 1317 - protein, 216 aa, synthetic construct
  source 1..216: note = Heterodimeric Fc Backbone 7 monomer 2 (+)
APPVAGPSVFLFPPKPKDTLMISRTPEVTCVVVDVKHEDPEVKFNWYVDGVEVHNAKTKPREEQYSSTYRVVSVLTVLHQDWLNGKEYKCKVSNKALPAPIEKTISKAKGQPREPQVYTLPPSREQMTKNQVKLTCLVKGFYPSDIAVEWESNGQPENNYKTTPPVLDSDGSFFLYSKLTVDKSRWQQGNVFSCSVMHEALHNHYTQKSLSLSPGK

SEQ ID NO: 1318 - protein, 217 aa, synthetic construct
  source 1..217: note = Heterodimeric Fc Backbone 8 monomer 1 (-)
APEFLGGPSVFLFPPKPKDTLMISRTPEVTCVVVDVSQEDPEVQFNWYVDGVEVHNAKTKPREEEFNSTYRVVSVLTVLHQDWLNGKEYKCKVSNKGLPSSIEKTISKAKGQPREPQVYTLPPSQEEMTKNQVSLTCDVSGFYPSDIAVEWESDGQPENNYKTTPPVLDSDGSFFLYSRLTVDKSRWEEGDVFSCSVMHEALHNHYTQKSLSLSLGK

SEQ ID NO: 1319 - protein, 217 aa, synthetic construct
  source 1..217: note = Heterodimeric Fc Backbone 8 monomer 2 (+)
APEFLGGPSVFLFPPKPKDTLMISRTPEVTCVVVDVSQEDPEVQFNWYVDGVEVHNAKTKPREEQFNSTYRVVSVLTVLHQDWLNGKEYKCKVSNKGLPSSIEKTISKAKGQPREPQVYTLPPSQEQMTKNQVKLTCLVKGFYPSDIAVEWESNGQPENNYKTTPPVLDSDGSFFLYSRLTVDKSRWQEGNVFSCSVMHEALHNHYTQKSLSLSLGK

SEQ ID NO: 1320 - protein, 216 aa, synthetic construct
  source 1..216: note = Heterodimeric Fc Backbone 9 monomer 1 (-)
APPVAGPSVFLFPPKPKDTLMISRTPEVTCVVVDVSHEDPEVQFNWYVDGVEVHNAKTKPREEEFNSTFRVVSVLTVVHQDWLNGKEYKCKVSNKGLPAPIEKTISKTKGQPREPQVYTLPPSREEMTKNQVSLTCDVSGFYPSDIAVEWESDGQPENNYKTTPPMLDSDGSFFLYSKLTVDKSRWEQGDVFSCSVMHEALHNHYTQKSLSLSPGK

SEQ ID NO: 1321 - protein, 216 aa, synthetic construct
  source 1..216: note = Heterodimeric Fc Backbone 9 monomer 2 (+)
APPVAGPSVFLFPPKPKDTLMISRTPEVTCVVVDVSHEDPEVQFNWYVDGVEVHNAKTKPREEQFNSTFRVVSVLTVVHQDWLNGKEYKCKVSNKGLPAPIEKTISKTKGQPREPQVYTLPPSREQMTKNQVKLTCLVKGFYPSDIAVEWESNGQPENNYKTTPPMLDSDGSFFLYSKLTVDKSRWQQGNVFSCSVMHEALHNHYTQKSLSLSPGK

SEQ ID NO: 1322 - protein, 216 aa, synthetic construct
  source 1..216: note = Heterodimeric Fc Backbone 10 monomer 1 (-)
APPVAGPSVFLFPPKPKDTLMISRTPEVTCVVVDVKHEDPEVQFNWYVDGVEVHNAKTKPREEEFNSTFRVVSVLTVVHQDWLNGKEYKCKVSNKGLPAPIEKTISKTKGQPREPQVYTLPPSREEMTKNQVSLTCDVSGFYPSDIAVEWESDGQPENNYKTTPPMLDSDGSFFLYSKLTVDKSRWEQGDVFSCSVMHEALHNHYTQKSLSLSPGK

SEQ ID NO: 1323 - protein, 216 aa, synthetic construct
  source 1..216: note = Heterodimeric Fc Backbone 10 monomer 2 (+)
APPVAGPSVFLFPPKPKDTLMISRTPEVTCVVVDVKHEDPEVQFNWYVDGVEVHNAKTKPREEQFNSTFRVVSVLTVVHQDWLNGKEYKCKVSNKGLPAPIEKTISKTKGQPREPQVYTLPPSREQMTKNQVKLTCLVKGFYPSDIAVEWESNGQPENNYKTTPPMLDSDGSFFLYSKLTVDKSRWQQGNVFSCSVMHEALHNHYTQKSLSLSPGK

SEQ ID NO: 1324 - protein, 216 aa, synthetic construct
  source 1..216: note = Heterodimeric Fc Backbone 11 monomer 1 (-)
APPVAGPSVFLFPPKPKDTLMISRTPEVTCVVVDVKHEDPEVKFNWYVDGVEVHNAKTKPREEEYNSTYRVVSVLTVLHQDWLNGKEYKCKVSNKALPAPIEKTISKAKGQPREPQVYTLPPSREEMTKNQVSLTCDVSGFYPSDIAVEWESDGQPENNYKTTPPVLDSDGSFFLYSKLTVDKSRWEQGDVFSCSVLHEALHSHYTQKSLSLSPGK

SEQ ID NO: 1325 - protein, 216 aa, synthetic construct
  source 1..216: note = Heterodimeric Fc Backbone 11 monomer 2 (+)
APPVAGPSVFLFPPKPKDTLMISRTPEVTCVVVDVKHEDPEVKFNWYVDGVEVHNAKTKPREEQYNSTYRVVSVLTVLHQDWLNGKEYKCKVSNKALPAPIEKTISKAKGQPREPQVYTLPPSREQMTKNQVKLTCLVKGFYPSDIAVEWESNGQPENNYKTTPPVLDSDGSFFLYSKLTVDKSRWQQGNVFSCSVLHEALHSHYTQKSLSLSPGK

SEQ ID NO: 1326 - protein, 216 aa, synthetic construct
  source 1..216: note = Heterodimeric Fc Backbone 12 monomer 1 (-)
APPVAGPSVFLFPPKPKDTLMISRTPEVTCVVVDVKHEDPEVKFKWYVDGVEVHNAKTKPREEQYNSTYRVVSVLTVLHQDWLNGKEYKCKVSNKALPAPIEKTISKAKGQPREPQVYTLPPSREQMTKNQVKLTCLVKGFYPSDIAVEWESNGQPENNYKTTPPVLDSDGSFFLYSKLTVDKSRWQQGNVFSCSVMHEALHNHYTQKSLSLSPGK

SEQ ID NO: 1327 - protein, 216 aa, synthetic construct; identical to SEQ ID NO: 1304
  source 1..216: note = Heterodimeric Fc Backbone 12 monomer 2 (+)

SEQ ID NO: 1328 - protein, 216 aa, synthetic construct
  source 1..216: note = Heterodimeric Fc Backbone 13 monomer 1
APPVAGPSVFLFPPKPKDTLMISRTPEVTCVVVDVKHEDPEVKFNWYVDGVEVHNAKTKPREEEYNSTYRVVSVLTVLHQDWLNGKEYKCKVSNKALPAPIEKTISKAKGQPREPQVYTLPPSRDELTKNQVSLTCDVSGFYPSDIAVEWESDGQPENNYKTTPPVLDSDGSFFLYSKLTVDKSRWEQGDVFSCSVLHEALHSHYTQKSLSLSPGK

SEQ ID NO: 1329 - protein, 216 aa, synthetic construct
  source 1..216: note = Heterodimeric Fc Backbone 13 monomer 2
APPVAGPSVFLFPPKPKDTLMISRTPEVTCVVVDVKHEDPEVKFNWYVDGVEVHNAKTKPREEQYNSTYRVVSVLTVLHQDWLNGKEYKCKVSNKALPAPIEKTISKAKGQPREPQVYTLPPSRDQLTKNQVKLTCLVKGFYPSDIAVEWESNGQPENNYKTTPPVLDSDGSFFLYSKLTVDKSRWQQGNVFSCSVLHEALHSHYTQKSLSLSPGK

SEQ ID NO: 1330 - protein, 216 aa, synthetic construct
  source 1..216: note = Heterodimeric Fc Backbone 14 monomer 1
APPVAGPSVFLFPPKPKDTLMISRTPEVTCVVVDVKHEDPEVKFNWYVDGVEVHNAKTKPREEEYNSTYRVVSVLTVLHQDWLNGKEYKCKVSNKALPAPIEKTISKAKGQPREPQVYTLPPSREEMTKNQVSLTCDVSGFYPSDIAVEWESDGQPENNYKTTPPVLDSDGSFFLYSKLTVDKSRWEQGDVFSCSVLHEALHAHYTQKSLSLSPGK

SEQ ID NO: 1331 - protein, 216 aa, synthetic construct
  source 1..216: note = Heterodimeric Fc Backbone 14 monomer 2
APPVAGPSVFLFPPKPKDTLMISRTPEVTCVVVDVKHEDPEVKFNWYVDGVEVHNAKTKPREEQYNSTYRVVSVLTVLHQDWLNGKEYKCKVSNKALPAPIEKTISKAKGQPREPQVYTLPPSREQMTKNQVKLTCLVKGFYPSDIAVEWESNGQPENNYKTTPPVLDSDGSFFLYSKLTVDKSRWQQGNVFSCSVLHEALHAHYTQKSLSLSPGK

SEQ ID NO: 1332 - protein, 216 aa, synthetic construct
  source 1..216: note = Heterodimeric Fc Backbone 15 monomer 1
APPVAGPSVFLFPPKPKDTLMISRTPEVTCVVVDVKHEDPEVKFNWYVDGVEVHNAKTKPREEEYNSTYRVVSVLTVLHQDWLNGKEYKCKVSNKALPAPIEKTISKAKGQPREPQVYTLPPSRDELTKNQVSLTCDVSGFYPSDIAVEWESDGQPENNYKTTPPVLDSDGSFFLYSKLTVDKSRWEQGDVFSCSVLHEALHAHYTQKSLSLSPGK

SEQ ID NO: 1333 - protein, 216 aa, synthetic construct
  source 1..216: note = Heterodimeric Fc Backbone 15 monomer 2
APPVAGPSVFLFPPKPKDTLMISRTPEVTCVVVDVKHEDPEVKFNWYVDGVEVHNAKTKPREEQYNSTYRVVSVLTVLHQDWLNGKEYKCKVSNKALPAPIEKTISKAKGQPREPQVYTLPPSRDQLTKNQVKLTCLVKGFYPSDIAVEWESNGQPENNYKTTPPVLDSDGSFFLYSKLTVDKSRWQQGNVFSCSVLHEALHAHYTQKSLSLSPGK

SEQ ID NO: 1334 - protein, 216 aa, synthetic construct; identical to SEQ ID NO: 1304
  source 1..216: note = 2 + 1 mAb-scFv Heterodimeric Fc Backbone monomer 1 (-)

SEQ ID NO: 1335 - protein, 215 aa, synthetic construct
  source 1..215: note = 2 + 1 mAb-scFv Heterodimeric Fc Backbone monomer 2 (+)
APPVAGPSVFLFPPKPKDTLMISRTPEVTCVVVDVKHEDPEVKFNWYVDGVEVHNAKTKPREEQYNSTYRVVSVLTVLHQDWLNGKEYKCKVSNKALPAPIEKTISKAKGQPREPQVYTLPPSREQMTKNQVKLTCLVKGFYPSDIAVEWESNGQPENNYKTTPPVLDSDGSFFLYSKLTVDKSRWQQGNVFSCSVMHEALHNHYTQKSLSLSPG

SEQ ID NO: 1336 - protein, 98 aa, synthetic construct
  source 1..98: note = IgG1 CH1(+)
ASTKGPSVFPLAPSSKSTSGGTAALGCLVKDYFPEPVTVSWNSGALTSGVHTFPAVLQSSGLYSLSSVVTVPSSSLGTQTYICNVNHKPSNTKVDKKV

SEQ ID NO: 1337 - protein, 98 aa, synthetic construct
  source 1..98: note = IgG1 CH1(-)
ASTKGPSVFPLAPSSKSTSGGTAALGCLVKDYFPEPVTVSWNSGALTSGVHTFPAVLQSSGLYSLSSVVTVPSSSLGTQTYICNVNHKPSDTKVDKKV

SEQ ID NO: 1338 - protein, 98 aa, synthetic construct
  source 1..98: note = IgG2 CH1(+)
ASTKGPSVFPLAPCSRSTSESTAALGCLVKDYFPEPVTVSWNSGALTSGVHTFPAVLQSSGLYSLSSVVTVPSSNFGTQTYTCNVDHKPSNTKVDKTV

SEQ ID NO: 1339 - protein, 98 aa, synthetic construct
  source 1..98: note = IgG2 CH1(-)
ASTKGPSVFPLAPCSRSTSESTAALGCLVKDYFPEPVTVSWNSGALTSGVHTFPAVLQSSGLYSLSSVVTVPSSNFGTQTYTCNVDHKPSDTKVDKTV

SEQ ID NO: 1340 - protein, 98 aa, synthetic construct
  source 1..98: note = IgG4 CH1(+)
ASTKGPSVFPLAPCSRSTSESTAALGCLVKDYFPEPVTVSWNSGALTSGVHTFPAVLQSSGLYSLSSVVTVPSSSLGTKTYTCNVDHKPSNTKVDKRV

SEQ ID NO: 1341 - protein, 98 aa, synthetic construct
  source 1..98: note = IgG4 CH1(-)
ASTKGPSVFPLAPCSRSTSESTAALGCLVKDYFPEPVTVSWNSGALTSGVHTFPAVLQSSGLYSLSSVVTVPSSSLGTKTYTCNVDHKPSDTKVDKRV

SEQ ID NO: 1342 - protein, 15 aa, synthetic construct
  source 1..15: note = IgG1 hinge
EPKSCDKTHTCPPCP

SEQ ID NO: 1343 - protein, 12 aa, synthetic construct
  source 1..12: note = IgG2 hinge
ERKCCVECPPCP

SEQ ID NO: 1344 - protein, 12 aa, synthetic construct
  source 1..12: note = IgG4 hinge
ESKYGPPCPSCP

SEQ ID NO: 1345 - protein, 107 aa, synthetic construct [sequence omitted]

SEQ ID NO: 1346 - protein, 106 aa, synthetic construct
  source 1..106: note = Light Chain Constant Domain - Lambda
GQPKAAPSVTLFPPSSEELQANKATLVCLISDFYPGAVTVAWKADSSPVKAGVETTTPSKQSNNKYAASSYLSLTPEQWKSHRSYSCQVTHEGSTVEKTVAPTECS

SEQ ID NO: 1347 - protein, 254 aa, synthetic construct
  source 1..254: note = CD3 High - [anti-CD3]_H1.30_L1.47_scFv scFv
EVQLVESGGGLVQPGGSLRLSCAASGFTFSTYAMNWVRQAPGKGLEWVGRIRSKYNNYATYYADSVKGRFTISRDDSKNTLYLQMNSLRAEDTAVYYCVRHGNFGDSYVSWFAYWGQGTLVTVSSGKPGSGKPGSGKPGSGKPGSQAVVTQEPSLTVSPGGTVTLTCGSSTGAVTTSNYANWVQQKPGKSPRGLIGGTNKRAPGVPARFSGSLLGGKAALTISGAQPEDEADYYCALWYSNHWVFGGGTKLTVL

SEQ ID NO: 1348 - protein, 125 aa, synthetic construct
  source 1..125: note = CD3 High - [anti-CD3]_H1.30_L1.47_scFv Variable Heavy (vh) Domain
EVQLVESGGGLVQPGGSLRLSCAASGFTFSTYAMNWVRQAPGKGLEWVGRIRSKYNNYATYYADSVKGRFTISRDDSKNTLYLQMNSLRAEDTAVYYCVRHGNFGDSYVSWFAYWGQGTLVTVSS

SEQ ID NO: 1349 - protein, 5 aa, synthetic construct
  source 1..5: note = CD3 High - [anti-CD3]_H1.30_L1.47_scFv vhCDR1
TYAMN

SEQ ID NO: 1350 - protein, 19 aa, synthetic construct
  source 1..19: note = CD3 High - [anti-CD3]_H1.30_L1.47_scFv vhCDR2
RIRSKYNNYATYYADSVKG

SEQ ID NO: 1351 - protein, 14 aa, synthetic construct
  source 1..14: note = CD3 High - [anti-CD3]_H1.30_L1.47_scFv vhCDR3
HGNFGDSYVSWFAY

SEQ ID NO: 1352 - protein, 109 aa, synthetic construct
  source 1..109: note = CD3 High - [anti-CD3]_H1.30_L1.47_scFv Variable Light (vl) Domain
QAVVTQEPSLTVSPGGTVTLTCGSSTGAVTTSNYANWVQQKPGKSPRGLIGGTNKRAPGVPARFSGSLLGGKAALTISGAQPEDEADYYCALWYSNHWVFGGGTKLTVL

SEQ ID NO: 1353 - protein, 14 aa, synthetic construct
  source 1..14: note = CD3 High - [anti-CD3]_H1.30_L1.47_scFv vlCDR1
GSSTGAVTTSNYAN

SEQ ID NO: 1354 - protein, 7 aa, synthetic construct
  source 1..7: note = CD3 High - [anti-CD3]_H1.30_L1.47_scFv vlCDR2
GTNKRAP

SEQ ID NO: 1355 - protein, 9 aa, synthetic construct
  source 1..9: note = CD3 High - [anti-CD3]_H1.30_L1.47_scFv vlCDR3
ALWYSNHWV

SEQ ID NO: 1356 - protein, 20 aa, synthetic construct
  source 1..20: note = CD3 High - [anti-CD3]_H1.30_L1.47_scFv Linker
GKPGSGKPGSGKPGSGKPGS

SEQ ID NO: 1357 - protein, 254 aa, synthetic construct
  source 1..254: note = CD3 High-Int #1 - [anti-CD3]_H1.32_L1.47_scFv scFv
EVQLVESGGGLVQPGGSLRLSCAASGFTFSTYAMNWVRQAPGKGLEWVGRIRSKANNYATYYADSVKGRFTISRDDSKNTLYLQMNSLRAEDTAVYYCVRHGNFGDSYVSWFAYWGQGTLVTVSSGKPGSGKPGSGKPGSGKPGSQAVVTQEPSLTVSPGGTVTLTCGSSTGAVTTSNYANWVQQKPGKSPRGLIGGTNKRAPGVPARFSGSLLGGKAALTISGAQPEDEADYYCALWYSNHWVFGGGTKLTVL

SEQ ID NO: 1358 - protein, 125 aa, synthetic construct
  source 1..125: note = CD3 High-Int #1 - [anti-CD3]_H1.32_L1.47_scFv Variable Heavy (vh) Domain
EVQLVESGGGLVQPGGSLRLSCAASGFTFSTYAMNWVRQAPGKGLEWVGRIRSKANNYATYYADSVKGRFTISRDDSKNTLYLQMNSLRAEDTAVYYCVRHGNFGDSYVSWFAYWGQGTLVTVSS

SEQ ID NO: 1359 - protein, 5 aa, synthetic construct
  source 1..5: note = CD3 High-Int #1 - [anti-CD3]_H1.32_L1.47_scFv vhCDR1
TYAMN

SEQ ID NO: 1360 - protein, 19 aa, synthetic construct
  source 1..19: note = CD3 High-Int #1 - [anti-CD3]_H1.32_L1.47_scFv vhCDR2
RIRSKANNYATYYADSVKG

SEQ ID NO: 1361 - protein, 14 aa, synthetic construct
  source 1..14: note = CD3 High-Int #1 - [anti-CD3]_H1.32_L1.47_scFv vhCDR3
HGNFGDSYVSWFAY

SEQ ID NO: 1362 - protein, 109 aa, synthetic construct; identical to SEQ ID NO: 1352
  source 1..109: note = CD3 High-Int #1 - [anti-CD3]_H1.32_L1.47_scFv Variable Light (vl) Domain

SEQ ID NO: 1363 - protein, 14 aa, synthetic construct
  source 1..14: note = CD3 High-Int #1 - [anti-CD3]_H1.32_L1.47_scFv vlCDR1
GSSTGAVTTSNYAN

SEQ ID NO: 1364 - protein, 7 aa, synthetic construct
  source 1..7: note = CD3 High-Int #1 - [anti-CD3]_H1.32_L1.47_scFv vlCDR2
GTNKRAP

SEQ ID NO: 1365 - protein, 9 aa, synthetic construct
  source 1..9: note = CD3 High-Int #1 - [anti-CD3]_H1.32_L1.47_scFv vlCDR3
ALWYSNHWV

SEQ ID NO: 1366 - protein, 20 aa, synthetic construct
  source 1..20: note = CD3 High-Int #1 - [anti-CD3]_H1.32_L1.47_scFv Linker
GKPGSGKPGSGKPGSGKPGS

SEQ ID NO: 1367 - protein, 254 aa, synthetic construct
  source 1..254: note = CD3 High-Int #2 - [anti-CD3]_H1.89_L1.47_scFv scFv
EVQLVESGGGLVQPGGSLRLSCAASGFTFSTYAMNWVRQAPGKGLEWVGRIRSKYNNYATYYADSVKGRFTISRDDSKNTLYLQMNSLRAEDTAVYYCVRHGNFGDEYVSWFAYWGQGTLVTVSSGKPGSGKPGSGKPGSGKPGSQAVVTQEPSLTVSPGGTVTLTCGSSTGAVTTSNYANWVQQKPGKSPRGLIGGTNKRAPGVPARFSGSLLGGKAALTISGAQPEDEADYYCALWYSNHWVFGGGTKLTVL

SEQ ID NO: 1368 - protein, 125 aa, synthetic construct
  source 1..125: note = CD3 High-Int #2 - [anti-CD3]_H1.89_L1.47_scFv Variable Heavy (vh) Domain
EVQLVESGGGLVQPGGSLRLSCAASGFTFSTYAMNWVRQAPGKGLEWVGRIRSKYNNYATYYADSVKGRFTISRDDSKNTLYLQMNSLRAEDTAVYYCVRHGNFGDEYVSWFAYWGQGTLVTVSS

SEQ ID NO: 1369 - protein, 5 aa, synthetic construct
  source 1..5: note = CD3 High-Int #2 - [anti-CD3]_H1.89_L1.47_scFv vhCDR1
TYAMN

SEQ ID NO: 1370 - protein, 19 aa, synthetic construct
  source 1..19: note = CD3 High-Int #2 - [anti-CD3]_H1.89_L1.47_scFv vhCDR2
RIRSKYNNYATYYADSVKG

SEQ ID NO: 1371 - protein, 14 aa, synthetic construct
  source 1..14: note = CD3 High-Int #2 - [anti-CD3]_H1.89_L1.47_scFv vhCDR3
HGNFGDEYVSWFAY

SEQ ID NO: 1372 - protein, 109 aa, synthetic construct; identical to SEQ ID NO: 1352
  source 1..109: note = CD3 High-Int #2 - [anti-CD3]_H1.89_L1.47_scFv Variable Light (vl) Domain

SEQ ID NO: 1373 - protein, 14 aa, synthetic construct
  source 1..14: note = CD3 High-Int #2 - [anti-CD3]_H1.89_L1.47_scFv vlCDR1
GSSTGAVTTSNYAN

SEQ ID NO: 1374 - protein, 7 aa, synthetic construct
  source 1..7: note = CD3 High-Int #2 - [anti-CD3]_H1.89_L1.47_scFv vlCDR2
GTNKRAP

SEQ ID NO: 1375 - protein, 9 aa, synthetic construct
  source 1..9: note = CD3 High-Int #2 - [anti-CD3]_H1.89_L1.47_scFv vlCDR3
ALWYSNHWV

SEQ ID NO: 1376 - protein, 20 aa, synthetic construct
  source 1..20: note = CD3 High-Int #2 - [anti-CD3]_H1.89_L1.47_scFv Linker
GKPGSGKPGSGKPGSGKPGS

SEQ ID NO: 1377 - protein, 254 aa, synthetic construct
  source 1..254: note = CD3 High-Int - [anti-CD3]_H1.90_L1.47_scFv scFv
EVQLVESGGGLVQPGGSLRLSCAASGFTFSTYAMNWVRQAPGKGLEWVGRIRSKYNNYATYYADSVKGRFTISRDDSKNTLYLQMNSLRAEDTAVYYCVRHGNFGDPYVSWFAYWGQGTLVTVSSGKPGSGKPGSGKPGSGKPGSQAVVTQEPSLTVSPGGTVTLTCGSSTGAVTTSNYANWVQQKPGKSPRGLIGGTNKRAPGVPARFSGSLLGGKAALTISGAQPEDEADYYCALWYSNHWVFGGGTKLTVL

SEQ ID NO: 1378 - protein, 125 aa, synthetic construct
  source 1..125: note = CD3 High-Int - [anti-CD3]_H1.90_L1.47_scFv Variable Heavy (vh) Domain
EVQLVESGGGLVQPGGSLRLSCAASGFTFSTYAMNWVRQAPGKGLEWVGRIRSKYNNYATYYADSVKGRFTISRDDSKNTLYLQMNSLRAEDTAVYYCVRHGNFGDPYVSWFAYWGQGTLVTVSS

SEQ ID NO: 1379 - protein, 5 aa, synthetic construct
  source 1..5: note = CD3 High-Int - [anti-CD3]_H1.90_L1.47_scFv vhCDR1
TYAMN

SEQ ID NO: 1380 - protein, 19 aa, synthetic construct
  source 1..19: note = CD3 High-Int - [anti-CD3]_H1.90_L1.47_scFv vhCDR2
RIRSKYNNYATYYADSVKG

SEQ ID NO: 1381 - protein, 14 aa, synthetic construct
  source 1..14: note = CD3 High-Int - [anti-CD3]_H1.90_L1.47_scFv vhCDR3
HGNFGDPYVSWFAY

SEQ ID NO: 1382 - protein, 109 aa, synthetic construct; identical to SEQ ID NO: 1352
  source 1..109: note = CD3 High-Int - [anti-CD3]_H1.90_L1.47_scFv Variable Light (vl) Domain

SEQ ID NO: 1383 - protein, 14 aa, synthetic construct
  source 1..14: note = CD3 High-Int - [anti-CD3]_H1.90_L1.47_scFv vlCDR1
GSSTGAVTTSNYAN

SEQ ID NO: 1384 - protein, 7 aa, synthetic construct
  source 1..7: note = CD3 High-Int - [anti-CD3]_H1.90_L1.47_scFv vlCDR2
GTNKRAP

SEQ ID NO: 1385 - protein, 9 aa, synthetic construct
  source 1..9: note = CD3 High-Int - [anti-CD3]_H1.90_L1.47_scFv vlCDR3
ALWYSNHWV

SEQ ID NO: 1386 - protein, 20 aa, synthetic construct
  source 1..20: note = CD3 High-Int - [anti-CD3]_H1.90_L1.47_scFv Linker
GKPGSGKPGSGKPGSGKPGS

SEQ ID NO: 1387 - protein, 254 aa, synthetic construct
  source 1..254: note = Anti-CD3-Intermediate - [anti-CD3]_H1.33_L1.47_scFv scFv
EVQLVESGGGLVQPGGSLRLSCAASGFTFSTYAMNWVRQAPGKGLEWVGRIRSKYNNYATYYADSVKGRFTISRDDSKNTLYLQMNSLRAEDTAVYYCVRHGNFGDSYVSWFDYWGQGTLVTVSSGKPGSGKPGSGKPGSGKPGSQAVVTQEPSLTVSPGGTVTLTCGSSTGAVTTSNYANWVQQKPGKSPRGLIGGTNKRAPGVPARFSGSLLGGKAALTISGAQPEDEADYYCALWYSNHWVFGGGTKLTVL

SEQ ID NO: 1388 - protein, 125 aa, synthetic construct
  source 1..125: note = Anti-CD3-Intermediate - [anti-CD3]_H1.33_L1.47_scFv Variable Heavy (vh) Domain
EVQLVESGGGLVQPGGSLRLSCAASGFTFSTYAMNWVRQAPGKGLEWVGRIRSKYNNYATYYADSVKGRFTISRDDSKNTLYLQMNSLRAEDTAVYYCVRHGNFGDSYVSWFDYWGQGTLVTVSS

SEQ ID NO: 1389 - protein, 5 aa, synthetic construct
  source 1..5: note = Anti-CD3-Intermediate - [anti-CD3]_H1.33_L1.47_scFv vhCDR1
TYAMN

SEQ ID NO: 1390 - protein, 19 aa, synthetic construct
  source 1..19: note = Anti-CD3-Intermediate - [anti-CD3]_H1.33_L1.47_scFv vhCDR2
RIRSKYNNYATYYADSVKG

SEQ ID NO: 1391 - protein, 14 aa, synthetic construct
  source 1..14: note = Anti-CD3-Intermediate - [anti-CD3]_H1.33_L1.47_scFv vhCDR3
HGNFGDSYVSWFDY

SEQ ID NO: 1392 - protein, 109 aa, synthetic construct; identical to SEQ ID NO: 1352
  source 1..109: note = Anti-CD3-Intermediate - [anti-CD3]_H1.33_L1.47_scFv Variable Light (vl) Domain

SEQ ID NO: 1393 - protein, 14 aa, synthetic construct
  source 1..14: note = Anti-CD3-Intermediate - [anti-CD3]_H1.33_L1.47_scFv vlCDR1
GSSTGAVTTSNYAN

SEQ ID NO: 1394 - protein, 7 aa, synthetic construct
  source 1..7: note = Anti-CD3-Intermediate - [anti-CD3]_H1.33_L1.47_scFv vlCDR2
GTNKRAP

SEQ ID NO: 1395 - protein, 9 aa, synthetic construct
  source 1..9: note = Anti-CD3-Intermediate - [anti-CD3]_H1.33_L1.47_scFv vlCDR3
ALWYSNHWV

SEQ ID NO: 1396 - protein, 20 aa, synthetic construct
  source 1..20: note = Anti-CD3-Intermediate - [anti-CD3]_H1.33_L1.47_scFv Linker
GKPGSGKPGSGKPGSGKPGS

SEQ ID NO: 1397 - protein, 254 aa, synthetic construct
  source 1..254: note = CD3 High-Int - [anti-CD3]_H1.31_L1.47_scFv scFv
EVQLVESGGGLVQPGGSLRLSCAASGFTFSTYAMSWVRQAPGKGLEWVGRIRSKYNNYATYYADSVKGRFTISRDDSKNTLYLQMNSLRAEDTAVYYCVRHGNFGDSYVSWFAYWGQGTLVTVSSGKPGSGKPGSGKPGSGKPGSQAVVTQEPSLTVSPGGTVTLTCGSSTGAVTTSNYANWVQQKPGKSPRGLIGGTNKRAPGVPARFSGSLLGGKAALTISGAQPEDEADYYCALWYSNHWVFGGGTKLTVL

SEQ ID NO: 1398 - protein, 125 aa, synthetic construct
  source 1..125: note = CD3 High-Int - [anti-CD3]_H1.31_L1.47_scFv Variable Heavy (vh) Domain
EVQLVESGGGLVQPGGSLRLSCAASGFTFSTYAMSWVRQAPGKGLEWVGRIRSKYNNYATYYADSVKGRFTISRDDSKNTLYLQMNSLRAEDTAVYYCVRHGNFGDSYVSWFAYWGQGTLVTVSS

SEQ ID NO: 1399 - protein, 5 aa, synthetic construct
  source 1..5: note = CD3 High-Int - [anti-CD3]_H1.31_L1.47_scFv vhCDR1
TYAMS

SEQ ID NO: 1400 - protein, 19 aa, synthetic construct
  source 1..19: note = CD3 High-Int - [anti-CD3]_H1.31_L1.47_scFv vhCDR2
RIRSKYNNYATYYADSVKG

SEQ ID NO: 1401 - protein, 14 aa, synthetic construct
  source 1..14: note = CD3 High-Int - [anti-CD3]_H1.31_L1.47_scFv vhCDR3
HGNFGDSYVSWFAY

SEQ ID NO: 1402 - protein, 109 aa, synthetic construct; identical to SEQ ID NO: 1352
  source 1..109: note = CD3 High-Int - [anti-CD3]_H1.31_L1.47_scFv Variable Light (vl) Domain

SEQ ID NO: 1403 - protein, 14 aa, synthetic construct
  source 1..14: note = CD3 High-Int - [anti-CD3]_H1.31_L1.47_scFv vlCDR1
GSSTGAVTTSNYAN

SEQ ID NO: 1404 - protein, 7 aa, synthetic construct
  source 1..7: note = CD3 High-Int - [anti-CD3]_H1.31_L1.47_scFv vlCDR2
GTNKRAP

SEQ ID NO: 1405 - protein, 9 aa, synthetic construct
  source 1..9: note = CD3 High-Int - [anti-CD3]_H1.31_L1.47_scFv vlCDR3
ALWYSNHWV

SEQ ID NO: 1406 - protein, 20 aa, synthetic construct
  source 1..20: note = CD3 High-Int - [anti-CD3]_H1.31_L1.47_scFv Linker
GKPGSGKPGSGKPGSGKPGS

SEQ ID NO: 1407 - protein, 254 aa, synthetic construct
  source 1..254: note = CD3 High[VL-VH] - [anti-CD3]_L1.47_ H1.30_scFv scFv
QAVVTQEPSLTVSPGGTVTLTCGSSTGAVTTSNYANWVQQKPGKSPRGLIGGTNKRAPGVPARFSGSLLGGKAALTISGAQPEDEADYYCALWYSNHWVFGGGTKLTVLGKPGSGKPGSGKPGSGKPGSEVQLVESGGGLVQPGGSLRLSCAASGFTFSTYAMNWVRQAPGKGLEWVGRIRSKYNNYATYYADSVKGRFTISRDDSKNTLYLQMNSLRAEDTAVYYCVRHGNFGDSYVSWFAYWGQGTLVTVSS

SEQ ID NO: 1408 - protein, 109 aa, synthetic construct; identical to SEQ ID NO: 1352
  source 1..109: note = CD3 High[VL-VH] - [anti-CD3]_L1.47_ H1.30_scFv Variable Light (vl) Domain

SEQ ID NO: 1409 - protein, 14 aa, synthetic construct
  source 1..14: note = CD3 High[VL-VH] - [anti-CD3]_L1.47_ H1.30_scFv vlCDR1
GSSTGAVTTSNYAN

SEQ ID NO: 1410 - protein, 7 aa, synthetic construct
  source 1..7: note = CD3 High[VL-VH] - [anti-CD3]_L1.47_ H1.30_scFv vlCDR2
GTNKRAP

SEQ ID NO: 1411 - protein, 9 aa, synthetic construct
  source 1..9: note = CD3 High[VL-VH] - [anti-CD3]_L1.47_ H1.30_scFv vlCDR3
ALWYSNHWV

SEQ ID NO: 1412 - protein, 125 aa, synthetic construct; identical to SEQ ID NO: 1348
  source 1..125: note = CD3 High[VL-VH] - [anti-CD3]_L1.47_ H1.30_scFv Variable Heavy (vh) Domain

SEQ ID NO: 1413 - protein, 5 aa, synthetic construct
  source 1..5: note = CD3 High[VL-VH] - [anti-CD3]_L1.47_ H1.30_scFv vhCDR1
TYAMN

SEQ ID NO: 1414 - protein, 19 aa, synthetic construct
  source 1..19: note = CD3 High[VL-VH] - [anti-CD3]_L1.47_ H1.30_scFv vhCDR2
RIRSKYNNYATYYADSVKG

SEQ ID NO: 1415 - protein, 14 aa, synthetic construct
  source 1..14: note = CD3 High[VL-VH] - [anti-CD3]_L1.47_ H1.30_scFv vhCDR3
HGNFGDSYVSWFAY

SEQ ID NO: 1416 - protein, 20 aa, synthetic construct
  source 1..20: note = CD3 High[VL-VH] - [anti-CD3]_L1.47_ H1.30_scFv Linker
GKPGSGKPGSGKPGSGKPGS

SEQ ID NO: 1417 - protein, 254 aa, synthetic construct
  source 1..254: note = CD3 High-Int #1[VL-VH] - [anti-CD3]_L1.47_ H1.32_scFv scFv
QAVVTQEPSLTVSPGGTVTLTCGSSTGAVTTSNYANWVQQKPGKSPRGLIGGTNKRAPGVPARFSGSLLGGKAALTISGAQPEDEADYYCALWYSNHWVFGGGTKLTVLGKPGSGKPGSGKPGSGKPGSEVQLVESGGGLVQPGGSLRLSCAASGFTFSTYAMNWVRQAPGKGLEWVGRIRSKANNYATYYADSVKGRFTISRDDSKNTLYLQMNSLRAEDTAVYYCVRHGNFGDSYVSWFAYWGQGTLVTVSS

SEQ ID NO: 1418 - protein, 109 aa, synthetic construct; identical to SEQ ID NO: 1352
  source 1..109: note = CD3 High-Int #1[VL-VH] - [anti-CD3]_L1.47_ H1.32_scFv Variable Light (vl) Domain

SEQ ID NO: 1419 - protein, 14 aa, synthetic construct
  source 1..14: note = CD3 High-Int #1[VL-VH] - [anti-CD3]_L1.47_ H1.32_scFv vlCDR1
GSSTGAVTTSNYAN

SEQ ID NO: 1420 - protein, 7 aa, synthetic construct
  source 1..7: note = CD3 High-Int #1[VL-VH] - [anti-CD3]_L1.47_ H1.32_scFv vlCDR2
GTNKRAP

SEQ ID NO: 1421 - protein, 9 aa, synthetic construct
  source 1..9: note = CD3 High-Int #1[VL-VH] - [anti-CD3]_L1.47_ H1.32_scFv vlCDR3
ALWYSNHWV

SEQ ID NO: 1422 - protein, 125 aa, synthetic construct; identical to SEQ ID NO: 1358
  source 1..125: note = CD3 High-Int #1[VL-VH] - [anti-CD3]_L1.47_ H1.32_scFv Variable Heavy (vh) Domain

SEQ ID NO: 1423 - protein, 5 aa, synthetic construct
  source 1..5: note = CD3 High-Int #1[VL-VH] - [anti-CD3]_L1.47_ H1.32_scFv vhCDR1
TYAMN

SEQ ID NO: 1424 - protein, 19 aa, synthetic construct
  source 1..19: note = CD3 High-Int #1[VL-VH] - [anti-CD3]_L1.47_ H1.32_scFv vhCDR2
RIRSKANNYATYYADSVKG

SEQ ID NO: 1425 - protein, 14 aa, synthetic construct
  source 1..14: note = CD3 High-Int #1[VL-VH] - [anti-CD3]_L1.47_ H1.32_scFv vhCDR3
HGNFGDSYVSWFAY

SEQ ID NO: 1426 - protein, 20 aa, synthetic construct
  source 1..20: note = CD3 High-Int #1[VL-VH] - [anti-CD3]_L1.47_ H1.32_scFv Linker
GKPGSGKPGSGKPGSGKPGS

SEQ ID NO: 1427 - protein, 254 aa, synthetic construct
  source 1..254: note = CD3 High-Int #2[VL-VH] - [anti-CD3]_L1.47_ H1.89_scFv scFv
QAVVTQEPSLTVSPGGTVTLTCGSSTGAVTTSNYANWVQQKPGKSPRGLIGGTNKRAPGVPARFSGSLLGGKAALTISGAQPEDEADYYCALWYSNHWVFGGGTKLTVLGKPGSGKPGSGKPGSGKPGSEVQLVESGGGLVQPGGSLRLSCAASGFTFSTYAMNWVRQAPGKGLEWVGRIRSKYNNYATYYADSVKGRFTISRDDSKNTLYLQMNSLRAEDTAVYYCVRHGNFGDEYVSWFAYWGQGTLVTVSS

SEQ ID NO: 1428 - protein, 109 aa, synthetic construct; identical to SEQ ID NO: 1352
  source 1..109: note = CD3 High-Int #2[VL-VH] - [anti-CD3]_L1.47_ H1.89_scFv Variable Light (vl) Domain

SEQ ID NO: 1429 - protein, 14 aa, synthetic construct
  source 1..14: note = CD3 High-Int #2[VL-VH] - [anti-CD3]_L1.47_ H1.89_scFv vlCDR1
GSSTGAVTTSNYAN

SEQ ID NO: 1430 - protein, 7 aa, synthetic construct
  source 1..7: note = CD3 High-Int #2[VL-VH] - [anti-CD3]_L1.47_ H1.89_scFv vlCDR2
GTNKRAP

SEQ ID NO: 1431 - protein, 9 aa, synthetic construct
  source 1..9: note = CD3 High-Int #2[VL-VH] - [anti-CD3]_L1.47_ H1.89_scFv vlCDR3
ALWYSNHWV

SEQ ID NO: 1432 - protein, 125 aa, synthetic construct; identical to SEQ ID NO: 1368
  source 1..125: note = CD3 High-Int #2[VL-VH] - [anti-CD3]_L1.47_ H1.89_scFv Variable Heavy (vh) Domain

SEQ ID NO: 1433 - protein, 5 aa, synthetic construct
  source 1..5: note = CD3 High-Int #2[VL-VH] - [anti-CD3]_L1.47_ H1.89_scFv vhCDR1
TYAMN

SEQ ID NO: 1434 - protein, 19 aa, synthetic construct
  source 1..19: note = CD3 High-Int #2[VL-VH] - [anti-CD3]_L1.47_ H1.89_scFv vhCDR2
RIRSKYNNYATYYADSVKG

SEQ ID NO: 1435 - protein, 14 aa, synthetic construct
  source 1..14: note = CD3 High-Int #2[VL-VH] - [anti-CD3]_L1.47_ H1.89_scFv vhCDR3
HGNFGDEYVSWFAY

SEQ ID NO: 1436 - protein, 20 aa, synthetic construct
  source 1..20: note = CD3 High-Int #2[VL-VH] - [anti-CD3]_L1.47_ H1.89_scFv Linker
GKPGSGKPGSGKPGSGKPGS

SEQ ID NO: 1437 - protein, 254 aa, synthetic construct
  source 1..254: note = CD3 High-Int[VL-VH] - [anti-CD3]_L1.47_ H1.90_scFv scFv
QAVVTQEPSLTVSPGGTVTLTCGSSTGAVTTSNYANWVQQKPGKSPRGLIGGTNKRAPGVPARFSGSLLGGKAALTISGAQPEDEADYYCALWYSNHWVFGGGTKLTVLGKPGSGKPGSGKPGSGKPGSEVQLVESGGGLVQPGGSLRLSCAASGFTFSTYAMNWVRQAPGKGLEWVGRIRSKYNNYATYYADSVKGRFTISRDDSKNTLYLQMNSLRAEDTAVYYCVRHGNFGDPYVSWFAYWGQGTLVTVSS

SEQ ID NO: 1438 - protein, 109 aa, synthetic construct; identical to SEQ ID NO: 1352
  source 1..109: note = CD3 High-Int[VL-VH] - [anti-CD3]_L1.47_ H1.90_scFv Variable Light (vl) Domain

SEQ ID NO: 1439 - protein, 14 aa, synthetic construct
  source 1..14: note = CD3 High-Int[VL-VH] - [anti-CD3]_L1.47_ H1.90_scFv vlCDR1
GSSTGAVTTSNYAN

SEQ ID NO: 1440 - protein, 7 aa, synthetic construct
  source 1..7: note = CD3 High-Int[VL-VH] - [anti-CD3]_L1.47_ H1.90_scFv vlCDR2
GTNKRAP

SEQ ID NO: 1441 - protein, 9 aa, synthetic construct
  source 1..9: note = CD3 High-Int[VL-VH] - [anti-CD3]_L1.47_ H1.90_scFv vlCDR3
ALWYSNHWV

SEQ ID NO: 1442 - protein, 125 aa, synthetic construct; identical to SEQ ID NO: 1378
  source 1..125: note = CD3 High-Int[VL-VH] - [anti-CD3]_L1.47_ H1.90_scFv Variable Heavy (vh) Domain

SEQ ID NO: 1443 - protein, 5 aa, synthetic construct
  source 1..5: note = CD3 High-Int[VL-VH] - [anti-CD3]_L1.47_ H1.90_scFv vhCDR1
TYAMN

SEQ ID NO: 1444 - protein, 19 aa, synthetic construct
  source 1..19: note = CD3 High-Int[VL-VH] - [anti-CD3]_L1.47_ H1.90_scFv vhCDR2
RIRSKYNNYATYYADSVKG

SEQ ID NO: 1445 - protein, 14 aa, synthetic construct
  source 1..14: note = CD3 High-Int[VL-VH] - [anti-CD3]_L1.47_ H1.90_scFv vhCDR3
HGNFGDPYVSWFAY

SEQ ID NO: 1446 - protein, 20 aa, synthetic construct
  source 1..20: note = CD3 High-Int[VL-VH] - [anti-CD3]_L1.47_ H1.90_scFv Linker
GKPGSGKPGSGKPGSGKPGS

SEQ ID NO: 1447 - protein, 254 aa, synthetic construct
  source 1..254: note = Anti-CD3-Intermediate[VL-VH] - [anti-CD3]_L1.47_ H1.33_scFv scFv
QAVVTQEPSLTVSPGGTVTLTCGSSTGAVTTSNYANWVQQKPGKSPRGLIGGTNKRAPGVPARFSGSLLGGKAALTISGAQPEDEADYYCALWYSNHWVFGGGTKLTVLGKPGSGKPGSGKPGSGKPGSEVQLVESGGGLVQPGGSLRLSCAASGFTFSTYAMNWVRQAPGKGLEWVGRIRSKYNNYATYYADSVKGRFTISRDDSKNTLYLQMNSLRAEDTAVYYCVRHGNFGDSYVSWFDYWGQGTLVTVSS

SEQ ID NO: 1448 - protein, 109 aa, synthetic construct; identical to SEQ ID NO: 1352
  source 1..109: note = Anti-CD3-Intermediate[VL-VH] - [anti-CD3]_L1.47_ H1.33_scFv Variable Light (vl) Domain

SEQ ID NO: 1449 - protein, 14 aa, synthetic construct
  source 1..14: note = Anti-CD3-Intermediate[VL-VH] - [anti-CD3]_L1.47_ H1.33_scFv vlCDR1
GSSTGAVTTSNYAN

SEQ ID NO: 1450 - protein, 7 aa, synthetic construct
  source 1..7: note = Anti-CD3-Intermediate[VL-VH] - [anti-CD3]_L1.47_ H1.33_scFv vlCDR2
GTNKRAP

SEQ ID NO: 1451 - protein, 9 aa, synthetic construct
  source 1..9: note = Anti-CD3-Intermediate[VL-VH] - [anti-CD3]_L1.47_ H1.33_scFv vlCDR3
ALWYSNHWV

SEQ ID NO: 1452 - protein, 125 aa, synthetic construct; identical to SEQ ID NO: 1388
  source 1..125: note = Anti-CD3-Intermediate[VL-VH] - [anti-CD3]_L1.47_ H1.33_scFv Variable Heavy (vh) Domain

SEQ ID NO: 1453 - protein, 5 aa, synthetic construct
  source 1..5: note = Anti-CD3-Intermediate[VL-VH] - [anti-CD3]_L1.47_ H1.33_scFv vhCDR1
TYAMN

SEQ ID NO: 1454 - protein, 19 aa, synthetic construct
  source 1..19: note = Anti-CD3-Intermediate[VL-VH] - [anti-CD3]_L1.47_ H1.33_scFv vhCDR2
RIRSKYNNYATYYADSVKG

SEQ ID NO: 1455 - protein, 14 aa, synthetic construct
  source 1..14: note = Anti-CD3-Intermediate[VL-VH] - [anti-CD3]_L1.47_ H1.33_scFv vhCDR3
HGNFGDSYVSWFDY

SEQ ID NO: 1456 - protein, 20 aa, synthetic construct
  source 1..20: note = Anti-CD3-Intermediate[VL-VH] - [anti-CD3]_L1.47_ H1.33_scFv Linker
GKPGSGKPGSGKPGSGKPGS

SEQ ID NO: 1457 - protein, 254 aa, synthetic construct
  source 1..254: note = CD3 High-Int[VL-VH] - [anti-CD3]_L1.47_ H1.31_scFv scFv
QAVVTQEPSLTVSPGGTVTLTCGSSTGAVTTSNYANWVQQKPGKSPRGLIGGTNKRAPGVPARFSGSLLGGKAALTISGAQPEDEADYYCALWYSNHWVFGGGTKLTVLGKPGSGKPGSGKPGSGKPGSEVQLVESGGGLVQPGGSLRLSCAASGFTFSTYAMSWVRQAPGKGLEWVGRIRSKYNNYATYYADSVKGRFTISRDDSKNTLYLQMNSLRAEDTAVYYCVRHGNFGDSYVSWFAYWGQGTLVTVSS

SEQ ID NO: 1458 - protein, 109 aa, synthetic construct; identical to SEQ ID NO: 1352
  source 1..109: note = CD3 High-Int[VL-VH] - [anti-CD3]_L1.47_ H1.31_scFv Variable Light (vl) Domain

SEQ ID NO: 1459 - protein, 14 aa, synthetic construct
  source 1..14: note = CD3 High-Int[VL-VH] - [anti-CD3]_L1.47_ H1.31_scFv vlCDR1
GSSTGAVTTSNYAN

SEQ ID NO: 1460 - protein, 7 aa, synthetic construct
  source 1..7: note = CD3 High-Int[VL-VH] - [anti-CD3]_L1.47_ H1.31_scFv vlCDR2
GTNKRAP

SEQ ID NO: 1461 - protein, 9 aa, synthetic construct
  source 1..9: note = CD3 High-Int[VL-VH] - [anti-CD3]_L1.47_ H1.31_scFv vlCDR3
ALWYSNHWV

SEQ ID NO: 1462 - protein, 125 aa, synthetic construct; identical to SEQ ID NO: 1398
  source 1..125: note = CD3 High-Int[VL-VH] - [anti-CD3]_L1.47_ H1.31_scFv Variable Heavy (vh) Domain

SEQ ID NO: 1463 - protein, 5 aa, synthetic construct
  source 1..5: note = CD3 High-Int[VL-VH] - [anti-CD3]_L1.47_ H1.31_scFv vhCDR1
TYAMS

SEQ ID NO: 1464 - protein, 19 aa, synthetic construct
  source 1..19: note = CD3 High-Int[VL-VH] - [anti-CD3]_L1.47_ H1.31_scFv vhCDR2
RIRSKYNNYATYYADSVKG

SEQ ID NO: 1465 - protein, 14 aa, synthetic construct
  source 1..14: note = CD3 High-Int[VL-VH] - [anti-CD3]_L1.47_ H1.31_scFv vhCDR3
HGNFGDSYVSWFAY

SEQ ID NO: 1466 - protein, 20 aa, synthetic construct
  source 1..20: note = CD3 High-Int[VL-VH] - [anti-CD3]_L1.47_ H1.31_scFv Linker
GKPGSGKPGSGKPGSGKPGS

SEQ ID NO: 1467 - protein, 118 aa, synthetic construct
  source 1..118: note = 2G4[PD-L1]_H1.1
EVQLLESGGGLVQPGGSLRLSCAASGFTFPSRDMSWVRQAPGKRLEWVSTISSGGSFTHYPDSVKGRFTISRDNSKNTLYLQMNSLRAEDTAVYYCVRRSGDWYFDVWGAGTTVTVSS

SEQ ID NO: 1468 - protein, 118 aa, synthetic construct
  source 1..118: note = 2G4[PD-L1]_H1.2
EVQLLESGGGLVQPGGSLRLSCAASGFTFSQKDMSWVRQAPGKRLEWVSTISSGGSFTHYPDSVKGRFTISRDNSKNTLYLQMNSLRAEDTAVYYCVRRSGDWYFDVWGAGTTVTVSS

SEQ ID NO: 1469 - protein, 118 aa, synthetic construct
  source 1..118: note = 2G4[PD-L1]_H1.3
EVQLLESGGGLVQPGGSLRLSCAASGFTFSSYDMSWVRQAPGKRLEWVSTISSGGSFTHYPDSVKGRFTISRDNSKNTLYLQMNSLRAEDTAVYYCVRRSLDWYFDVWGAGTTVTVSS

SEQ ID NO: 1470 - protein, 118 aa, synthetic construct
  source 1..118: note = 2G4[PD-L1]_H1.4
EVQLLESGGGLVQPGGSLRLSCAASGFTFSSYDMSWVRQAPGKRLEWVSTISSGGSFTHYPDSVKGRFTISRDNSKNTLYLQMNSLRAEDTAVYYCARRSLDWYFDVWGAGTTVTVSS

SEQ ID NO: 1471 - protein, 118 aa, synthetic construct
  source 1..118: note = 2G4[PD-L1]_H1.5
EVQLLESGGGLVQPGGSLRLSCAASGFTFRSYDMSWVRQAPGKRLEWVSTISSGGSFTHYPDSVKGRFTISRDNSKNTLYLQMNSLRAEDTAVYYCVRRSGDWYFDVWGAGTTVTVSS

SEQ ID NO: 1472 - protein, 118 aa, synthetic construct
  source 1..118: note = 2G4[PD-L1]_H1.6
EVQLLESGGGLVQPGGSLRLSCAASGFTFHSRDMSWVRQAPGKRLEWVSTISSGGRFTHYPDSVKGRFTISRDNSKNTLYLQMNSLRAEDTAVYYCVRRSGDWYFDVWGAGTTVTVSS

SEQ ID NO: 1473 - protein, 118 aa, synthetic construct
  source 1..118: note = 2G4[PD-L1]_H1.7
EVQLLESGGGLVQPGGSLRLSCAASGFTFSSYDMSWVRQAPGKRLEWVSTISSGGSFTHYPDSVKGRFTISRDNSKNTLYLQMNSLRAEDTAVYYCVRRSSDWYFDVWGAGTTVTVSS

SEQ ID NO: 1474 - protein, 118 aa, synthetic construct
  source 1..118: note = 2G4[PD-L1]_H1.8
EVQLLESGGGLVQPGGSLRLSCAASGFTFSSSDMSWVRQAPGKRLEWVSTISSGGSFTHYPDSVKGRFTISRDNSKNTLYLQMNSLRAEDTAVYYCVRRSGDWYFDVWGAGTTVTVSS

SEQ ID NO: 1475 - protein, 118 aa, synthetic construct
  source 1..118: note = 2G4[PD-L1]_H1.9
EVQLLESGGGLVQPGGSLRLSCAASGFTFSFRDMSWVRQAPGKRLEWVSTISSGGSFTHYPDSVKGRFTISRDNSKNTLYLQMNSLRAEDTAVYYCVRRSGDWYFDVWGAGTTVTVSS

SEQ ID NO: 1476 - protein, 118 aa, synthetic construct
  source 1..118: note = 2G4[PD-L1]_H1.10
EVQLLESGGGLVQPGGSLRLSCAASGFTFSWYDMSWVRQAPGKRLEWVSTISSGGSFTHYPDSVKGRFTISRDNSKNTLYLQMNSLRAEDTAVYYCVRRSGDWYFDVWGAGTTVTVSS

SEQ ID NO: 1477 - protein, 118 aa, synthetic construct
  source 1..118: note = 2G4[PD-L1]_H1.11
EVQLLESGGGLVQPGGSLRLSCAASGFTFSVYDMSWVRQAPGKRLEWVSTISSGGSFTHYPDSVKGRFTISRDNSKNTLYLQMNSLRAEDTAVYYCVRRSGDWYFDVWGAGTTVTVSS

SEQ ID NO: 1478 - protein, 118 aa, synthetic construct
  source 1..118: note = 2G4[PD-L1]_H1.12
EVQLLESGGGLVQPGGSLRLSCAASGFTFSVYDMSWVRQAPGKRLEWVSTISSGGSFTHYPDSVKGRFTISRDNSKNTLYLQMNSLRAEDTAVYYCVRRSLDWYFDVWGAGTTVTVSS

SEQ ID NO: 1479 - protein, 118 aa, synthetic construct
  source 1..118: note = 2G4[PD-L1]_H1.13
EVQLLESGGGLVQPGGSLRLSCAASGFTFSSKDMSWVRQAPGKRLEWVSTISSGGSFTHYPDSVKGRFTISRDNSKNTLYLQMNSLRAEDTAVYYCVRRSGDWYFDVWGAGTTVTVSS

SEQ ID NO: 1480 - protein, 118 aa, synthetic construct
  source 1..118: note = 2G4[PD-L1]_H1.14
EVQLLESGGGLVQPGGSLRLSCAASGFTFSSSDMSWVRQAPGKRLEWVSTISSGGSFTHYPDSVKGRFTISRDNSKNTLYLQMNSLRAEDTAVYYCVRRSLDWYFDVWGAGTTVTVSS

SEQ ID NO: 1481 - protein, 118 aa, synthetic construct
  source 1..118: note = 2G4[PD-L1]_H1.15
EVQLLESGGGLVQPGGSLRLSCAASGFTFSSADMSWVRQAPGKRLEWVSTISSGGSFTHYPDSVKGRFTISRDNSKNTLYLQMNSLRAEDTAVYYCVRRSGDWYFDVWGAGTTVTVSS

SEQ ID NO: 1482 - protein, 118 aa, synthetic construct
  source 1..118: note = 2G4[PD-L1]_H1.16
EVQLLESGGGLVQPGGSLRLSCAASGFTFSSRDMSWVRQAPGKRLEWVSTISSGGSFTHYPDSVKGRFTISRDNSKNTLYLQMNSLRAEDTAVYYCVRRSGDWYFDVWGAGTTVTVSS

SEQ ID NO: 1483 - protein, 118 aa, synthetic construct
  source 1..118: note = 2G4[PD-L1]_H1.17
EVQLLESGGGLVQPGGSLRLSCAASGFTFPSRDMSWVRQAPGKRLEWVSTISSGGRFTHYPDSVKGRFTISRDNSKNTLYLQMNSLRAEDTAVYYCVRRSLDWYFDVWGAGTTVTVSS

SEQ ID NO: 1484 - protein, 118 aa, synthetic construct
  source 1..118: note = 2G4[PD-L1]_H1.18
EVQLLESGGGLVQPGGSLRLSCAASGFTFPSKDMSWVRQAPGKRLEWVSTISSGGRFTHYPDSVKGRFTISRDNSKNTLYLQMNSLRAEDTAVYYCVRRSLDWYFDVWGAGTTVTVSS

SEQ ID NO: 1485 - protein, 118 aa, synthetic construct
  source 1..118: note = 2G4[PD-L1]_H1.19
EVQLLESGGGLVQPGGSLRLSCAASGFTFHSSDMSWVRQAPGKRLEWVSTISSGGRFTHYPDSVKGRFTISRDNSKNTLYLQMNSLRAEDTAVYYCVRRSLDWYFDVWGAGTTVTVSS

SEQ ID NO: 1486 - protein, 118 aa, synthetic construct
  source 1..118: note = 2G4[PD-L1]_H1.20
EVQLLESGGGLVQPGGSLRLSCAASGFTFHSADMSWVRQAPGKRLEWVSTISSGGRFTHYPDSVKGRFTISRDNSKNTLYLQMNSLRAEDTAVYYCVRRSLDWYFDVWGAGTTVTVSS

SEQ ID NO: 1487 - protein, 118 aa, synthetic construct
  source 1..118: note = 2G4[PD-L1]_H1.21
EVQLLESGGGLVQPGGSLRLSCAASGFTFSWADMSWVRQAPGKRLEWVSTISSGGRFTHYPDSVKGRFTISRDNSKNTLYLQMNSLRAEDTAVYYCVRRSLDWYFDVWGAGTTVTVSS

SEQ ID NO: 1488 - protein, 118 aa, synthetic construct
  source 1..118: note = 2G4[PD-L1]_H1.22
EVQLLESGGGLVQPGGSLRLSCAASGFTFSVRDMSWVRQAPGKRLEWVSTISSGGRFTHYPDSVKGRFTISRDNSKNTLYLQMNSLRAEDTAVYYCVRRSLDWYFDVWGAGTTVTVSS

SEQ ID NO: 1489 - protein, 118 aa, synthetic construct
  source 1..118: note = 2G4[PD-L1]_H1.23
EVQLLESGGGLVQPGGSLRLSCAASGFTFSVKDMSWVRQAPGKRLEWVSTISSGGRFTHYPDSVKGRFTISRDNSKNTLYLQMNSLRAEDTAVYYCVRRSLDWYFDVWGAGTTVTVSS

SEQ ID NO: 1490 - protein, 118 aa, synthetic construct
  source 1..118: note = 2G4[PD-L1]_H1.24
EVQLLESGGGLVQPGGSLRLSCAASGFTFSFSDMSWVRQAPGKRLEWVSTISSGGRFTHYPDSVKGRFTISRDNSKNTLYLQMNSLRAEDTAVYYCVRRSLDWYFDVWGAGTTVTVSS

SEQ ID NO: 1491 - protein, 118 aa, synthetic construct
  source 1..118: note = 2G4[PD-L1]_H1.25
EVQLLESGGGLVQPGGSLRLSCAASGFTFSFRDMSWVRQAPGKRLEWVSTISSGGRFTHYPDSVKGRFTISRDNSKNTLYLQMNSLRAEDTAVYYCVRRSLDWYFDVWGAGTTVTVSS

SEQ ID NO: 1492 - protein, 118 aa, synthetic construct
  source 1..118: note = 2G4[PD-L1]_H1.26
EVQLLESGGGLVQPGGSLRLSCAASGFTFSVSDMSWVRQAPGKRLEWVSTISSGGRFTHYPDSVKGRFTISRDNSKNTLYLQMNSLRAEDTAVYYCVRRSLDWYFDVWGAGTTVTVSS

SEQ ID NO: 1493 - protein, 118 aa, synthetic construct
  source 1..118: note = 2G4[PD-L1]_H1.27
EVQLLESGGGLVQPGGSLRLSCAASGFTFSQSDMSWVRQAPGKRLEWVSTISSGGRFTHYPDSVKGRFTISRDNSKNTLYLQMNSLRAEDTAVYYCVRRSLDWYFDVWGAGTTVTVSS

SEQ ID NO: 1494 - protein, 118 aa, synthetic construct
  source 1..118: note = 2G4[PD-L1]_H1.28
EVQLLESGGGLVQPGGSLRLSCAASGFTFPSSDMSWVRQAPGKRLEWVSTISSGGRFTHYPDSVKGRFTISRDNSKNTLYLQMNSLRAEDTAVYYCVRRSLDWYFDVWGAGTTVTVSS

SEQ ID NO: 1495 - protein, 118 aa, synthetic construct
  source 1..118: note = 2G4[PD-L1]_H1.29
EVQLLESGGGLVQPGGSLRLSCAASGFTFSQKDMSWVRQAPGKRLEWVSTISSGGRFTHYPDSVKGRFTISRDNSKNTLYLQMNSLRAEDTAVYYCVRRSLDWYFDVWGAGTTVTVSS

SEQ ID NO: 1496 - protein, 118 aa, synthetic construct
  source 1..118: note = 2G4[PD-L1]_H1.30
EVQLLESGGGLVQPGGSLRLSCAASGFTFSQYDMSWVRQAPGKRLEWVSTISSGGRFTHYPDSVKGRFTISRDNSKNTLYLQMNSLRAEDTAVYYCVRRSLDWYFDVWGAGTTVTVSS

SEQ ID NO: 1497 - protein, 118 aa, synthetic construct
  source 1..118: note = 2G4[PD-L1]_H1.31
EVQLLESGGGLVQPGGSLRLSCAASGFTFRSYDMSWVRQAPGKRLEWVSTISSGGRFTHYPDSVKGRFTISRDNSKNTLYLQMNSLRAEDTAVYYCVRRSLDWYFDVWGAGTTVTVSS

SEQ ID NO: 1498 - protein, 118 aa, synthetic construct
  source 1..118: note = 2G4[PD-L1]_H1.32
EVQLLESGGGLVQPGGSLRLSCAASGFTFSSSDMSWVRQAPGKRLEWVSTISSGGRFTHYPDSVKGRFTISRDNSKNTLYLQMNSLRAEDTAVYYCVRRSLDWYFDVWGAGTTVTVSS

SEQ ID NO: 1499 - protein, 118 aa, synthetic construct
  source 1..118: note = 2G4[PD-L1]_H1.33
EVQLLESGGGLVQPGGSLRLSCAASGFTFSWYDMSWVRQAPGKRLEWVSTISSGGRFTHYPDSVKGRFTISRDNSKNTLYLQMNSLRAEDTAVYYCVRRSLDWYFDVWGAGTTVTVSS

SEQ ID NO: 1500 - protein, 118 aa, synthetic construct
  source 1..118: note = 2G4[PD-L1]_H1.34
EVQLLESGGGLVQPGGSLRLSCAASGFTFSVYDMSWVRQAPGKRLEWVSTISSGGRFTHYPDSVKGRFTISRDNSKNTLYLQMNSLRAEDTAVYYCVRRSLDWYFDVWGAGTTVTVSS

SEQ ID NO: 1501 - protein, 118 aa, synthetic construct
  source 1..118: note = 2G4[PD-L1]_H1.35
EVQLLESGGGLVQPGGSLRLSCAASGFTFSSKDMSWVRQAPGKRLEWVSTISSGGRFTHYPDSVKGRFTISRDNSKNTLYLQMNSLRAEDTAVYYCVRRSLDWYFDVWGAGTTVTVSS

SEQ ID NO: 1502 - protein, 118 aa, synthetic construct
  source 1..118: note = 2G4[PD-L1]_H1.36
EVQLLESGGGLVQPGGSLRLSCAASGFTFSSADMSWVRQAPGKRLEWVSTISSGGRFTHYPDSVKGRFTISRDNSKNTLYLQMNSLRAEDTAVYYCVRRSLDWYFDVWGAGTTVTVSS

SEQ ID NO: 1503 - protein, 118 aa, synthetic construct
  source 1..118: note = 2G4[PD-L1]_H1.37
EVQLLESGGGLVQPGGSLRLSCAASGFTFSSRDMSWVRQAPGKRLEWVSTISSGGRFTHYPDSVKGRFTISRDNSKNTLYLQMNSLRAEDTAVYYCVRRSLDWYFDVWGAGTTVTVSS

SEQ ID NO: 1504 - protein, 118 aa, synthetic construct
  source 1..118: note = 2G4[PD-L1]_H1.38
EVQLLESGGGLVQPGGSLRLSCAASGFTFPSRDMSWVRQAPGKRLEWVSTISSGGRFTHYPDSVKGRFTISRDNSKNTLYLQMNSLRAEDTAVYYCARRSLDWYFDVWGAGTTVTVSS

SEQ ID NO: 1505 - protein, 118 aa, synthetic construct
  source 1..118: note = 2G4[PD-L1]_H1.39
EVQLLESGGGLVQPGGSLRLSCAASGFTFPSKDMSWVRQAPGKRLEWVSTISSGGRFTHYPDSVKGRFTISRDNSKNTLYLQMNSLRAEDTAVYYCARRSLDWYFDVWGAGTTVTVSS

SEQ ID NO: 1506 - protein, 118 aa, synthetic construct
  source 1..118: note = 2G4[PD-L1]_H1.40
EVQLLESGGGLVQPGGSLRLSCAASGFTFHSSDMSWVRQAPGKRLEWVSTISSGGRFTHYPDSVKGRFTISRDNSKNTLYLQMNSLRAEDTAVYYCARRSLDWYFDVWGAGTTVTVSS

SEQ ID NO: 1507 - protein, 118 aa, synthetic construct
  source 1..118: note = 2G4[PD-L1]_H1.41
EVQLLESGGGLVQPGGSLRLSCAASGFTFHSADMSWVRQAPGKRLEWVSTISSGGRFTHYPDSVKGRFTISRDNSKNTLYLQMNSLRAEDTAVYYCARRSLDWYFDVWGAGTTVTVSS

SEQ ID NO: 1508 - protein, 118 aa, synthetic construct
  source 1..118: note = 2G4[PD-L1]_H1.42
EVQLLESGGGLVQPGGSLRLSCAASGFTFSWADMSWVRQAPGKRLEWVSTISSGGRFTHYPDSVKGRFTISRDNSKNTLYLQMNSLRAEDTAVYYCARRSLDWYFDVWGAGTTVTVSS

SEQ ID NO: 1509 - protein, 118 aa, synthetic construct
  source 1..118: note = 2G4[PD-L1]_H1.43
EVQLLESGGGLVQPGGSLRLSCAASGFTFSVRDMSWVRQAPGKRLEWVSTISSGGRFTHYPDSVKGRFTISRDNSKNTLYLQMNSLRAEDTAVYYCARRSLDWYFDVWGAGTTVTVSS

SEQ ID NO: 1510 - protein, 118 aa, synthetic construct
  source 1..118: note = 2G4[PD-L1]_H1.44
EVQLLESGGGLVQPGGSLRLSCAASGFTFSVKDMSWVRQAPGKRLEWVSTISSGGRFTHYPDSVKGRFTISRDNSKNTLYLQMNSLRAEDTAVYYCARRSLDWYFDVWGAGTTVTVSS

SEQ ID NO: 1511 - protein, 118 aa, synthetic construct
  source 1..118: note = 2G4[PD-L1]_H1.45
EVQLLESGGGLVQPGGSLRLSCAASGFTFSFSDMSWVRQAPGKRLEWVSTISSGGRFTHYPDSVKGRFTISRDNSKNTLYLQMNSLRAEDTAVYYCARRSLDWYFDVWGAGTTVTVSS

SEQ ID NO: 1512 - protein, 118 aa, synthetic construct
  source 1..118: note = 2G4[PD-L1]_H1.46
EVQLLESGGGLVQPGGSLRLSCAASGFTFSFRDMSWVRQAPGKRLEWVSTISSGGRFTHYPDSVKGRFTISRDNSKNTLYLQMNSLRAEDTAVYYCARRSLDWYFDVWGAGTTVTVSS

SEQ ID NO: 1513 - protein, 118 aa, synthetic construct
  source 1..118: note = 2G4[PD-L1]_H1.47
EVQLLESGGGLVQPGGSLRLSCAASGFTFSVSDMSWVRQAPGKRLEWVSTISSGGRFTHYPDSVKGRFTISRDNSKNTLYLQMNSLRAEDTAVYYCARRSLDWYFDVWGAGTTVTVSS

SEQ ID NO: 1514 - protein, 118 aa, synthetic construct
  source 1..118: note = 2G4[PD-L1]_H1.48
EVQLLESGGGLVQPGGSLRLSCAASGFTFSQSDMSWVRQAPGKRLEWVSTISSGGRFTHYPDSVKGRFTISRDNSKNTLYLQMNSLRAEDTAVYYCARRSLDWYFDVWGAGTTVTVSS

SEQ ID NO: 1515 - protein, 118 aa, synthetic construct
  source 1..118: note = 2G4[PD-L1]_H1.49
EVQLLESGGGLVQPGGSLRLSCAASGFTFPSSDMSWVRQAPGKRLEWVSTISSGGRFTHYPDSVKGRFTISRDNSKNTLYLQMNSLRAEDTAVYYCARRSLDWYFDVWGAGTTVTVSS

SEQ ID NO: 1516 - protein, 118 aa, synthetic construct
  source 1..118: note = 2G4[PD-L1]_H1.50
EVQLLESGGGLVQPGGSLRLSCAASGFTFSQKDMSWVRQAPGKRLEWVSTISSGGRFTHYPDSVKGRFTISRDNSKNTLYLQMNSLRAEDTAVYYCARRSLDWYFDVWGAGTTVTVSS

SEQ ID NO: 1517 - protein, 118 aa, synthetic construct
  source 1..118: note = 2G4[PD-L1]_H1.51
EVQLLESGGGLVQPGGSLRLSCAASGFTFSQYDMSWVRQAPGKRLEWVSTISSGGRFTHYPDSVKGRFTISRDNSKNTLYLQMNSLRAEDTAVYYCARRSLDWYFDVWGAGTTVTVSS

SEQ ID NO: 1518 - protein, 118 aa, synthetic construct
  source 1..118: note = 2G4[PD-L1]_H1.52
EVQLLESGGGLVQPGGSLRLSCAASGFTFRSYDMSWVRQAPGKRLEWVSTISSGGRFTHYPDSVKGRFTISRDNSKNTLYLQMNSLRAEDTAVYYCARRSLDWYFDVWGAGTTVTVSS

SEQ ID NO: 1519 - protein, 118 aa, synthetic construct
  source 1..118: note = 2G4[PD-L1]_H1.53
EVQLLESGGGLVQPGGSLRLSCAASGFTFSSSDMSWVRQAPGKRLEWVSTISSGGRFTHYPDSVKGRFTISRDNSKNTLYLQMNSLRAEDTAVYYCARRSLDWYFDVWGAGTTVTVSS

SEQ ID NO: 1520 - protein, 118 aa, synthetic construct
  source 1..118: note = 2G4[PD-L1]_H1.54
EVQLLESGGGLVQPGGSLRLSCAASGFTFSWYDMSWVRQAPGKRLEWVSTISSGGRFTHYPDSVKGRFTISRDNSKNTLYLQMNSLRAEDTAVYYCARRSLDWYFDVWGAGTTVTVSS

SEQ ID NO: 1521 - protein, 118 aa, synthetic construct
  source 1..118: note = 2G4[PD-L1]_H1.55
EVQLLESGGGLVQPGGSLRLSCAASGFTFSVYDMSWVRQAPGKRLEWVSTISSGGRFTHYPDSVKGRFTISRDNSKNTLYLQMNSLRAEDTAVYYCARRSLDWYFDVWGAGTTVTVSS

SEQ ID NO: 1522 - protein, 118 aa, synthetic construct
  source 1..118: note = 2G4[PD-L1]_H1.56
EVQLLESGGGLVQPGGSLRLSCAASGFTFSSKDMSWVRQAPGKRLEWVSTISSGGRFTHYPDSVKGRFTISRDNSKNTLYLQMNSLRAEDTAVYYCARRSLDWYFDVWGAGTTVTVSS

SEQ ID NO: 1523 - protein, 118 aa, synthetic construct
  source 1..118: note = 2G4[PD-L1]_H1.57
EVQLLESGGGLVQPGGSLRLSCAASGFTFSSADMSWVRQAPGKRLEWVSTISSGGRFTHYPDSVKGRFTISRDNSKNTLYLQMNSLRAEDTAVYYCARRSLDWYFDVWGAGTTVTVSS

SEQ ID NO: 1524 - protein, 118 aa, synthetic construct
  source 1..118: note = 2G4[PD-L1]_H1.58
EVQLLESGGGLVQPGGSLRLSCAASGFTFSSRDMSWVRQAPGKRLEWVSTISSGGRFTHYPDSVKGRFTISRDNSKNTLYLQMNSLRAEDTAVYYCARRSLDWYFDVWGAGTTVTVSS

SEQ ID NO: 1525 - protein, 118 aa, synthetic construct
  source 1..118: note = 2G4[PD-L1]_H1.59
EVQLLESGGGLVQPGGSLRLSCAASGFTFHSRDMSWVRQAPGKGLEWVSTISSGGRFTHYPDSVKGRFTISRDNSKNTLYLQMNSLRAEDTAVYYCARRSGDWYFDVWGAGTTVTVSS

SEQ ID NO: 1526 - protein, 118 aa, synthetic construct
  source 1..118: note = 2G4[PD-L1]_H1.60
EVQLLESGGGLVQPGGSLRLSCAASGFTFSSSDMSWVRQAPGKGLEWVSTISSGGSFTHYPDSVKGRFTISRDNSKNTLYLQMNSLRAEDTAVYYCARRSLDWYFDVWGAGTTVTVSS

SEQ ID NO: 1527 - protein, 118 aa, synthetic construct
  source 1..118: note = 2G4[PD-L1]_H1.61
EVQLLESGGGLVQPGGSLRLSCAASGFTFSSYDMSWVRQAPGKGLEWVSTISSGGSFTHYPDSVKGRFTISRDNSKNTLYLQMNSLRAEDTAVYYCARRSLDWYFDVWGAGTTVTVSS

SEQ ID NO: 1528 - protein, 118 aa, synthetic construct
  source 1..118: note = 2G4[PD-L1]_H1.62
EVQLLESGGGLVQPGGSLRLSCAASGFTFSSYDMSWVRQAPGKGLEWVSTISSGGSFTHYPDSVKGRFTISRDNSKNTLYLQMNSLRAEDTAVYYCARRSGDWYFDVWGAGTTVTVSS

SEQ ID NO: 1529 - protein, 109 aa, synthetic construct
  source 1..109: note = 2G4[PD-L1]_L1.1
EIVLTQSPGTLSLSPGERATLSCRVSSSISSSNLHWYQQKPGQSPRPLIYGTSNLASGVPVRFSGSGSGTDYTLTISRLEPEDFAVYYCQQWWSYPLYTFGGGTKVEIK

SEQ ID NO: 1530 - protein, 109 aa, synthetic construct
  source 1..109: note = 2G4[PD-L1]_L1.2
EIVLTQSPGTLSLSPGERATLSCRVSSSISSSNLHWYQQKPGQSPRPLIYGTSNLASGVPVRFSGSGSGTDYTLTISRLEPEDFAVYYCQQWFSYPLYTFGGGTKVEIK

SEQ ID NO: 1531 - protein, 109 aa, synthetic construct
  source 1..109: note = 2G4[PD-L1]_L1.3
EIVLTQSPGTLSLSPGERATLSCRVSSSISSSNLHWYQQKPGQSPRPLIYGTSNLASGVPVRFSGSGSGTDYTLTISRLEPEDFAVYYCQQWSSYPLWTFGGGTKVEIK

SEQ ID NO: 1532 - protein, 109 aa, synthetic construct
  source 1..109: note = 2G4[PD-L1]_L1.4
EIVLTQSPGTLSLSPGERATLSCRVSWSGSSSNLHWYQQKPGQSPRLLIYGTSNLAGGVPVRFSGSGSGTDYTLTISRLEPEDFAVYYCQQWSSYPLYTFGGGTKVEIK

SEQ ID NO: 1533 - protein, 109 aa, synthetic construct
  source 1..109: note = 2G4[PD-L1]_L1.5
EIVLTQSPGTLSLSPGERATLSCRVSSSISSSNLHWYQQKPGQSPRPLIYGTSNLASGVPVRFSGSGSGTDYTLTISRLEPEDFAVYYCQQWHSYPLYTFGGGTKVEIK

SEQ ID NO: 1534 - protein, 109 aa, synthetic construct
  source 1..109: note = 2G4[PD-L1]_L1.6
EIVLTQSPGTLSLSPGERATLSCRVSSFIVSSNLHWYQQKPGQSPRPLIYGTSNLASGVPVRFSGSGSGTDYTLTISRLEPEDFAVYYCQQWSSYPLYTFGGGTKVEIK

SEQ ID NO: 1535 - protein, 109 aa, synthetic construct
  source 1..109: note = 2G4[PD-L1]_L1.7
EIVLTQSPGTLSLSPGERATLSCRVSSSINFSNLHWYQQKPGQSPRPLIYGTSNLASGVPVRFSGSGSGTDYTLTISRLEPEDFAVYYCQQWSSYPLYTFGGGTKVEIK

SEQ ID NO: 1536 - protein, 109 aa, synthetic construct
  source 1..109: note = 2G4[PD-L1]_L1.8
EIVLTQSPGTLSLSPGERATLSCRVSLSINSSNLHWYQQKPGQSPRPLIYGTNLLASGVPVRFSGSGSGTDYTLTISRLEPEDFAVYYCQQWSSYPLYTFGGGTKVEIK

SEQ ID NO: 1537 - protein, 109 aa, synthetic construct
  source 1..109: note = 2G4[PD-L1]_L1.9
EIVLTQSPGTLSLSPGERATLSCRVSSSIIRSNLHWYQQKPGQSPRPLIYGTSQLASGVPVRFSGSGSGTDYTLTISRLEPEDFAVYYCQQWSSYPLYTFGGGTKVEIK

SEQ ID NO: 1538 - protein, 109 aa, synthetic construct
  source 1..109: note = 2G4[PD-L1]_L1.10
EIVLTQSPGTLSLSPGERATLSCRVSSSINSTNLHWYQQKPGQSPRPLIYGTSVLATGVPVRFSGSGSGTDYTLTISRLEPEDFAVYYCQQWSSYPLYTFGGGTKVEIK

SEQ ID NO: 1539 - protein, 109 aa, synthetic construct
  source 1..109: note = 2G4[PD-L1]_L1.11
EIVLTQSPGTLSLSPGERATLSCRVSSSINPSNLHWYQQKPGQSPRPLIYGTSNLASGVPVRFSGSGSGTDYTLTISRLEPEDFAVYYCQQWSSYPLYTFGGGTKVEIK

SEQ ID NO: 1540 - protein, 109 aa, synthetic construct
  source 1..109: note = 2G4[PD-L1]_L1.12
EIVLTQSPGTLSLSPGERATLSCRASSSITSSNLHWYQQKPGQSPRPLIYGTSNLASGVPVRFSGSGSGTDYTLTISRLEPEDFAVYYCQQWSSYPLYTFGGGTKVEIK

SEQ ID NO: 1541 - protein, 109 aa, synthetic construct
  source 1..109: note = 2G4[PD-L1]_L1.13
EIVLTQSPGTLSLSPGERATLSCRASSSMVSSNLHWYQQKPGQSPRPLIYGTSNLASGVPVRFSGSGSGTDYTLTISRLEPEDFAVYYCQQWSSYPLYTFGGGTKVEIK

SEQ ID NO: 1542 - protein, 109 aa, synthetic construct
  source 1..109: note = 2G4[PD-L1]_L1.14
EIVLTQSPGTLSLSPGERATLSCRVSSSIQSSNLHWYQQKPGQSPRPLIYGTSNLASGVPVRFSGSGSGTDYTLTISRLEPEDFAVYYCQQWSSYPLYTFGGGTKVEIK

SEQ ID NO: 1543 - protein, 109 aa, synthetic construct
  source 1..109: note = 2G4[PD-L1]_L1.15
EIVLTQSPGTLSLSPGERATLSCRVSSSIQLSNLHWYQQKPGQSPRPLIYGTSNLASGVPVRFSGSGSGTDYTLTISRLEPEDFAVYYCQQWSSYPLYTFGGGTKVEIK

SEQ ID NO: 1544 - protein, 109 aa, synthetic construct
  source 1..109: note = 2G4[PD-L1]_L1.16
EIVLTQSPGTLSLSPGERATLSCRASSSINDSNLHWYQQKPGQSPRLLIYGTSNLRSGVPVRFSGSGSGTDYTLTISRLEPEDFAVYYCQQWSSYPLYTFGGGTKVEIK

SEQ ID NO: 1545 - protein, 109 aa, synthetic construct
  source 1..109: note = 2G4[PD-L1]_L1.17
EIVLTQSPGTLSLSPGERATLSCRVSSSISLSNLHWYQQKPGQSPRPLIYGTSNLASGVPVRFSGSGSGTDYTLTISRLEPEDFAVYYCQQWSSYPLYTFGGGTKVEIK

SEQ ID NO: 1546 - protein, 109 aa, synthetic construct
  source 1..109: note = 2G4[PD-L1]_L1.18
EIVLTQSPGTLSLSPGERATLSCRASSRISRSNLHWYQQKPGQSPRPLIYGTINLASGVPVRFSGSGSGTDYTLTISRLEPEDFAVYYCQQWSSYPLYTFGGGTKVEIK

SEQ ID NO: 1547 - protein, 109 aa, synthetic construct
  source 1..109: note = 2G4[PD-L1]_L1.19
EIVLTQSPGTLSLSPGERATLSCRVSSSINGSNLHWYQQKPGQSPRPLIYGTSNLASGVPVRFSGSGSGTDYTLTISRLEPEDFAVYYCQQWSSYPLYTFGGGTKVEIK

SEQ ID NO: 1548 - protein, 109 aa, synthetic construct
  source 1..109: note = 2G4[PD-L1]_L1.20
EIVLTQSPGTLSLSPGERATLSCRVSSSINSSNLHWYQQKPGQSPRPLIYGTSNLASGVPVRFSGSGSGTDYTLTISRLEPEDFAVYYCQQWSSYPLYTFGGGTKVEIK

SEQ ID NO: 1549 - protein, 109 aa, synthetic construct
  source 1..109: note = 2G4[PD-L1]_L1.21
EIVLTQSPGTLSLSPGERATLSCRVSYSISRSNLHWYQQKPGQSPRPLIYGTSNRLSGVPVRFSGSGSGTDYTLTISRLEPEDFAVYYCQQWSSYPLYTFGGGTKVEIK

SEQ ID NO: 1550 - protein, 109 aa, synthetic construct
  source 1..109: note = 2G4[PD-L1]_L1.22
EIVLTQSPGTLSLSPGERATLSCRVSSSIQFSNLHWYQQKPGQSPRPLIYGTSNLASGVPVRFSGSGSGTDYTLTISRLEPEDFAVYYCQQWSSYPLYTFGGGTKVEIK

SEQ ID NO: 1551 - protein, 109 aa, synthetic construct
  source 1..109: note = 2G4[PD-L1]_L1.23
EIVLTQSPGTLSLSPGERATLSCRVSLSIQSSNLHWYQQKPGQSPRPLIYGTNLLASGVPVRFSGSGSGTDYTLTISRLEPEDFAVYYCQQWSSYPLYTFGGGTKVEIK

SEQ ID NO: 1552 - protein, 109 aa, synthetic construct
  source 1..109: note = 2G4[PD-L1]_L1.24
EIVLTQSPGTLSLSPGERATLSCRVSSSIQSTNLHWYQQKPGQSPRPLIYGTSVLATGVPVRFSGSGSGTDYTLTISRLEPEDFAVYYCQQWSSYPLYTFGGGTKVEIK

SEQ ID NO: 1553 - protein, 109 aa, synthetic construct
  source 1..109: note = 2G4[PD-L1]_L1.25
EIVLTQSPGTLSLSPGERATLSCRVSSSIQPSNLHWYQQKPGQSPRPLIYGTSNLASGVPVRFSGSGSGTDYTLTISRLEPEDFAVYYCQQWSSYPLYTFGGGTKVEIK

SEQ ID NO: 1554 - protein, 109 aa, synthetic construct
  source 1..109: note = 2G4[PD-L1]_L1.26
EIVLTQSPGTLSLSPGERATLSCRASSSIQDSNLHWYQQKPGQSPRLLIYGTSNLRSGVPVRFSGSGSGTDYTLTISRLEPEDFAVYYCQQWSSYPLYTFGGGTKVEIK

SEQ ID NO: 1555 - protein, 109 aa, synthetic construct
  source 1..109: note = 2G4[PD-L1]_L1.27
EIVLTQSPGTLSLSPGERATLSCRVSSSIQGSNLHWYQQKPGQSPRPLIYGTSNLASGVPVRFSGSGSGTDYTLTISRLEPEDFAVYYCQQWSSYPLYTFGGGTKVEIK

SEQ ID NO: 1556 - protein, 109 aa, synthetic construct
  source 1..109: note = 2G4[PD-L1]_L1.28
EIVLTQSPGTLSLSPGERATLSCRVSSFIVLSNLHWYQQKPGQSPRPLIYGTSVLATGVPVRFSGSGSGTDYTLTISRLEPEDFAVYYCQQWSSYPLWTFGGGTKVEIK

SEQ ID NO: 1557 - protein, 109 aa, synthetic construct
  source 1..109: note = 2G4[PD-L1]_L1.29
EIVLTQSPGTLSLSPGERATLSCRVSSRIVLSNLHWYQQKPGQSPRPLIYGTSVLATGVPVRFSGSGSGTDYTLTISRLEPEDFAVYYCQQWSSYPLWTFGGGTKVEIK

SEQ ID NO: 1558 - protein, 109 aa, synthetic construct
  source 1..109: note = 2G4[PD-L1]_L1.30
EIVLTQSPGTLSLSPGERATLSCRASSFIVLSNLHWYQQKPGQSPRPLIYGTSVLATGVPVRFSGSGSGTDYTLTISRLEPEDFAVYYCQQWSSYPLWTFGGGTKVEIK

SEQ ID NO: 1559 - protein, 109 aa, synthetic construct
  source 1..109: note = 2G4[PD-L1]_L1.31
EIVLTQSPGTLSLSPGERATLSCRASSRIVLSNLHWYQQKPGQSPRPLIYGTSVLATGVPVRFSGSGSGTDYTLTISRLEPEDFAVYYCQQWSSYPLWTFGGGTKVEIK

SEQ ID NO: 1560 - protein, 109 aa, synthetic construct
  source 1..109: note = 2G4[PD-L1]_L1.32
EIVLTQSPGTLSLSPGERATLSCRVSSFIQLSNLHWYQQKPGQSPRPLIYGTSVLATGVPVRFSGSGSGTDYTLTISRLEPEDFAVYYCQQWSSYPLWTFGGGTKVEIK

SEQ ID NO: 1561 - protein, 109 aa, synthetic construct
  source 1..109: note = 2G4[PD-L1]_L1.33
EIVLTQSPGTLSLSPGERATLSCRVSSRIQLSNLHWYQQKPGQSPRPLIYGTSVLATGVPVRFSGSGSGTDYTLTISRLEPEDFAVYYCQQWSSYPLWTFGGGTKVEIK

SEQ ID NO: 1562 - protein, 109 aa, synthetic construct
  source 1..109: note = 2G4[PD-L1]_L1.34
EIVLTQSPGTLSLSPGERATLSCRASSFIQLSNLHWYQQKPGQSPRLLIYGTSVLATGVPVRFSGSGSGTDYTLTISRLEPEDFAVYYCQQWSSYPLWTFGGGTKVEIK

SEQ ID NO: 1563 - protein, 109 aa, synthetic construct
  source 1..109: note = 2G4[PD-L1]_L1.35
EIVLTQSPGTLSLSPGERATLSCRASSRIQLSNLHWYQQKPGQSPRPLIYGTSVLATGVPVRFSGSGSGTDYTLTISRLEPEDFAVYYCQQWSSYPLWTFGGGTKVEIK

SEQ ID NO: 1564 - protein, 109 aa, synthetic construct
  source 1..109: note = 2G4[PD-L1]_L1.36
EIVLTQSPGTLSLSPGERATLSCRVSSFISRSNLHWYQQKPGQSPRPLIYGTSVLATGVPVRFSGSGSGTDYTLTISRLEPEDFAVYYCQQWSSYPLWTFGGGTKVEIK

SEQ ID NO: 1565 - protein, 109 aa, synthetic construct
  source 1..109: note = 2G4[PD-L1]_L1.37
EIVLTQSPGTLSLSPGERATLSCRVSSRISRSNLHWYQQKPGQSPRPLIYGTSVLATGVPVRFSGSGSGTDYTLTISRLEPEDFAVYYCQQWSSYPLWTFGGGTKVEIK

SEQ ID NO: 1566 - protein, 109 aa, synthetic construct
  source 1..109: note = 2G4[PD-L1]_L1.38
EIVLTQSPGTLSLSPGERATLSCRASSFISRSNLHWYQQKPGQSPRPLIYGTSVLATGVPVRFSGSGSGTDYTLTISRLEPEDFAVYYCQQWSSYPLWTFGGGTKVEIK

SEQ ID NO: 1567 - protein, 109 aa, synthetic construct
  source 1..109: note = 2G4[PD-L1]_L1.39
EIVLTQSPGTLSLSPGERATLSCRASSRISRSNLHWYQQKPGQSPRPLIYGTSVLATGVPVRFSGSGSGTDYTLTISRLEPEDFAVYYCQQWSSYPLWTFGGGTKVEIK

SEQ ID NO: 1568 - protein, 109 aa, synthetic construct
  source 1..109: note = 2G4[PD-L1]_L1.40
EIVLTQSPGTLSLSPGERATLSCRVSSFIQRSNLHWYQQKPGQSPRPLIYGTSVLATGVPVRFSGSGSGTDYTLTISRLEPEDFAVYYCQQWSSYPLWTFGGGTKVEIK

SEQ ID NO: 1569 - protein, 109 aa, synthetic construct
  source 1..109: note = 2G4[PD-L1]_L1.41
EIVLTQSPGTLSLSPGERATLSCRVSSRIQRSNLHWYQQKPGQSPRPLIYGTSVLATGVPVRFSGSGSGTDYTLTISRLEPEDFAVYYCQQWSSYPLWTFGGGTKVEIK

SEQ ID NO: 1570 - protein, 109 aa, synthetic construct
  source 1..109: note = 2G4[PD-L1]_L1.42
EIVLTQSPGTLSLSPGERATLSCRASSFIQRSNLHWYQQKPGQSPRPLIYGTSVLATGVPVRFSGSGSGTDYTLTISRLEPEDFAVYYCQQWSSYPLWTFGGGTKVEIK

SEQ ID NO: 1571 - protein, 109 aa, synthetic construct
  source 1..109: note = 2G4[PD-L1]_L1.43
EIVLTQSPGTLSLSPGERATLSCRASSRIQRSNLHWYQQKPGQSPRPLIYGTSVLATGVPVRFSGSGSGTDYTLTISRLEPEDFAVYYCQQWSSYPLWTFGGGTKVEIK

SEQ ID NO: 1572 - protein, 109 aa, synthetic construct
  source 1..109: note = 2G4[PD-L1]_L1.44
EIVLTQSPGTLSLSPGERATLSCRVSSFIVLSNLHWYQQKPGQSPRPLIYGTSVLATGVPVRFSGSGSGTDYTLTISRLEPEDFAVYYCQQWSSYPLYTFGGGTKVEIK

SEQ ID NO: 1573 - protein, 109 aa, synthetic construct
  source 1..109: note = 2G4[PD-L1]_L1.45
EIVLTQSPGTLSLSPGERATLSCRVSSRIVLSNLHWYQQKPGQSPRPLIYGTSVLATGVPVRFSGSGSGTDYTLTISRLEPEDFAVYYCQQWSSYPLYTFGGGTKVEIK

SEQ ID NO: 1574 - protein, 109 aa, synthetic construct
  source 1..109: note = 2G4[PD-L1]_L1.46
EIVLTQSPGTLSLSPGERATLSCRASSFIVLSNLHWYQQKPGQSPRPLIYGTSVLATGVPVRFSGSGSGTDYTLTISRLEPEDFAVYYCQQWSSYPLYTFGGGTKVEIK

SEQ ID NO: 1575 - protein, 109 aa, synthetic construct
  source 1..109: note = 2G4[PD-L1]_L1.47
EIVLTQSPGTLSLSPGERATLSCRASSRIVLSNLHWYQQKPGQSPRLLIYGTSVLATGVPVRFSGSGSGTDYTLTISRLEPEDFAVYYCQQWSSYPLYTFGGGTKVEIK

SEQ ID NO: 1576 - protein, 109 aa, synthetic construct
  source 1..109: note = 2G4[PD-L1]_L1.48
EIVLTQSPGTLSLSPGERATLSCRVSSFIQLSNLHWYQQKPGQSPRPLIYGTSVLATGVPVRFSGSGSGTDYTLTISRLEPEDFAVYYCQQWSSYPLYTFGGGTKVEIK

SEQ ID NO: 1577 - protein, 109 aa, synthetic construct
  source 1..109: note = 2G4[PD-L1]_L1.49
EIVLTQSPGTLSLSPGERATLSCRVSSRIQLSNLHWYQQKPGQSPRPLIYGTSVLATGVPVRFSGSGSGTDYTLTISRLEPEDFAVYYCQQWSSYPLYTFGGGTKVEIK

SEQ ID NO: 1578 - protein, 109 aa, synthetic construct
  source 1..109: note = 2G4[PD-L1]_L1.50
EIVLTQSPGTLSLSPGERATLSCRASSFIQLSNLHWYQQKPGQSPRPLIYGTSVLATGVPVRFSGSGSGTDYTLTISRLEPEDFAVYYCQQWSSYPLYTFGGGTKVEIK

SEQ ID NO: 1579 - protein, 109 aa, synthetic construct
  source 1..109: note = 2G4[PD-L1]_L1.51
EIVLTQSPGTLSLSPGERATLSCRASSRIQLSNLHWYQQKPGQSPRPLIYGTSVLATGVPVRFSGSGSGTDYTLTISRLEPEDFAVYYCQQWSSYPLYTFGGGTKVEIK

SEQ ID NO: 1580 - protein, 109 aa, synthetic construct
  source 1..109: note = 2G4[PD-L1]_L1.52
EIVLTQSPGTLSLSPGERATLSCRVSSFISRSNLHWYQQKPGQSPRPLIYGTSVLATGVPVRFSGSGSGTDYTLTISRLEPEDFAVYYCQQWSSYPLYTFGGGTKVEIK

SEQ ID NO: 1581 - protein, 109 aa, synthetic construct
  source 1..109: note = 2G4[PD-L1]_L1.53
EIVLTQSPGTLSLSPGERATLSCRVSSRISRSNLHWYQQKPGQSPRPLIYGTSVLATGVPVRFSGSGSGTDYTLTISRLEPEDFAVYYCQQWSSYPLYTFGGGTKVEIK

SEQ ID NO: 1582 - protein, 109 aa, synthetic construct
  source 1..109: note = 2G4[PD-L1]_L1.54
EIVLTQSPGTLSLSPGERATLSCRASSFISRSNLHWYQQKPGQSPRPLIYGTSVLATGVPVRFSGSGSGTDYTLTISRLEPEDFAVYYCQQWSSYPLYTFGGGTKVEIK

SEQ ID NO: 1583 - protein, 109 aa, synthetic construct
  source 1..109: note = 2G4[PD-L1]_L1.55
EIVLTQSPGTLSLSPGERATLSCRASSRISRSNLHWYQQKPGQSPRPLIYGTSVLATGVPVRFSGSGSGTDYTLTISRLEPEDFAVYYCQQWSSYPLYTFGGGTKVEIK

SEQ ID NO: 1584 - protein, 109 aa, synthetic construct
  source 1..109: note = 2G4[PD-L1]_L1.56
EIVLTQSPGTLSLSPGERATLSCRVSSFIQRSNLHWYQQKPGQSPRPLIYGTSVLATGVPVRFSGSGSGTDYTLTISRLEPEDFAVYYCQQWSSYPLYTFGGGTKVEIK

SEQ ID NO: 1585 - protein, 109 aa, synthetic construct
  source 1..109: note = 2G4[PD-L1]_L1.57
EIVLTQSPGTLSLSPGERATLSCRVSSRIQRSNLHWYQQKPGQSPRPLIYGTSVLATGVPVRFSGSGSGTDYTLTISRLEPEDFAVYYCQQWSSYPLYTFGGGTKVEIK

SEQ ID NO: 1586 - protein, 109 aa, synthetic construct
  source 1..109: note = 2G4[PD-L1]_L1.58
EIVLTQSPGTLSLSPGERATLSCRASSFIQRSNLHWYQQKPGQSPRPLIYGTSVLATGVPVRFSGSGSGTDYTLTISRLEPEDFAVYYCQQWSSYPLYTFGGGTKVEIK

SEQ ID NO: 1587 - protein, 109 aa, synthetic construct
  source 1..109: note = 2G4[PD-L1]_L1.59
EIVLTQSPGTLSLSPGERATLSCRASSRIQRSNLHWYQQKPGQSPRPLIYGTSVLATGVPVRFSGSGSGTDYTLTISRLEPEDFAVYYCQQWSSYPLYTFGGGTKVEIK

SEQ ID NO: 1588 - protein, 109 aa, synthetic construct
  source 1..109: note = 2G4[PD-L1]_L1.60
EIVLTQSPGTLSLSPGERATLSCRASSSISSSNLHWYQQKPGQSPRLLIYGTSNLASGVPVRFSGSGSGTDYTLTISRLEPEDFAVYYCQQWSSYPLWTFGGGTKVEIK

SEQ ID NO: 1589 - protein, 109 aa, synthetic construct
  source 1..109: note = 2G4[PD-L1]_L1.61
EIVLTQSPGTLSLSPGERATLSCRASLSIQSSNLHWYQQKPGQSPRLLIYGTNLLASGVPVRFSGSGSGTDYTLTISRLEPEDFAVYYCQQWSSYPLYTFGGGTKVEIK

SEQ ID NO: 1590 - protein, 109 aa, synthetic construct
  source 1..109: note = 2G4[PD-L1]_L1.62
EIVLTQSPGTLSLSPGERATLSCRASSSIQSTNLHWYQQKPGQSPRLLIYGTSVLATGVPVRFSGSGSGTDYTLTISRLEPEDFAVYYCQQWSSYPLYTFGGGTKVEIK

SEQ ID NO: 1591 - protein, 109 aa, synthetic construct
  source 1..109: note = 2G4[PD-L1]_L1.63
EIVLTQSPGTLSLSPGERATLSCRASSSISSSNLHWYQQKPGQSPRLLIYGTSNLASGVPVRFSGSGSGTDYTLTISRLEPEDFAVYYCQQWSSYPLYTFGGGTKVEIK

SEQ ID NO: 1592 - protein, 109 aa, synthetic construct
  source 1..109: note = 2G4[PD-L1]_L1.64
EIVLTQSPGTLSLSPGERATLSCRVSSSISSTNLHWYQQKPGQSPRPLIYGTSVLATGVPVRFSGSGSGTDYTLTISRLEPEDFAVYYCQQWSSYPLYTFGGGTKVEIK

SEQ ID NO: 1593 - protein, 109 aa, synthetic construct
  source 1..109: note = 2G4[PD-L1]_L1.65
EIVLTQSPGTLSLSPGERATLSCRVSSSIQSSNLHWYQQKPGQSPRPLIYGTSVLATGVPVRFSGSGSGTDYTLTISRLEPEDFAVYYCQQWSSYPLYTFGGGTKVEIK

SEQ ID NO: 1594 - protein, 109 aa, synthetic construct
  source 1..109: note = 2G4[PD-L1]_L1.66
EIVLTQSPGTLSLSPGERATLSCRVSSSIQSTNLHWYQQKPGQSPRPLIYGTSNLATGVPVRFSGSGSGTDYTLTISRLEPEDFAVYYCQQWSSYPLYTFGGGTKVEIK

SEQ ID NO: 1595 - protein, 109 aa, synthetic construct
  source 1..109: note = 2G4[PD-L1]_L1.67
EIVLTQSPGTLSLSPGERATLSCRVSSSIQSTNLHWYQQKPGQSPRPLIYGTSVLASGVPVRFSGSGSGTDYTLTISRLEPEDFAVYYCQQWSSYPLYTFGGGTKVEIK

SEQ ID NO: 1596 - protein, 109 aa, synthetic construct
  source 1..109: note = 2G4[PD-L1]_L1.68
EIVLTQSPGTLSLSPGERATLSCRVSSSIQSTNLHWYQQKPGQSPRPLIYGTSNLASGVPVRFSGSGSGTDYTLTISRLEPEDFAVYYCQQWSSYPLYTFGGGTKVEIK

SEQ ID NO: 1597 - protein, 109 aa, synthetic construct
  source 1..109: note = 2G4[PD-L1]_L1.69
EIVLTQSPGTLSLSPGERATLSCRVSSSISSSNLHWYQQKPGQSPRPLIYGTSVLATGVPVRFSGSGSGTDYTLTISRLEPEDFAVYYCQQWSSYPLYTFGGGTKVEIK

SEQ ID NO: 1598 - protein, 109 aa, synthetic construct
  source 1..109: note = 2G4[PD-L1]_L1.70
EIVLTQSPGTLSLSPGERATLSCRVSSSIQSTNLHWYQQKPGQSPRPLIYGTSSLATGVPVRFSGSGSGTDYTLTISRLEPEDFAVYYCQQWSSYPLYTFGGGTKVEIK

SEQ ID NO: 1599 - protein, 109 aa, synthetic construct
  source 1..109: note = 2G4[PD-L1]_L1.71
EIVLTQSPGTLSLSPGERATLSCRVSSSIQSTNLHWYQQKPGQSPRPLIYGTSTLATGVPVRFSGSGSGTDYTLTISRLEPEDFAVYYCQQWSSYPLYTFGGGTKVEIK

SEQ ID NO: 1600 - protein, 118 aa, synthetic construct; identical to SEQ ID NO: 1478
  source 1..118: note = 2G4[CD28]_H1.12_L1.24 Variable Heavy (vh) Domain

SEQ ID NO: 1601 - protein, 5 aa, synthetic construct
  source 1..5: note = 2G4[CD28]_H1.12_L1.24 vhCDR1
VYDMS

SEQ ID NO: 1602 - protein, 17 aa, synthetic construct
  source 1..17: note = 2G4[CD28]_H1.12_L1.24 vhCDR2
TISSGGSFTHYPDSVKG

SEQ ID NO: 1603 - protein, 9 aa, synthetic construct
  source 1..9: note = 2G4[CD28]_H1.12_L1.24 vhCDR3
RSLDWYFDV

SEQ ID NO: 1604 - protein, 109 aa, synthetic construct; identical to SEQ ID NO: 1552
  source 1..109: note = 2G4[CD28]_H1.12_L1.24 Variable Light (vl) Domain

SEQ ID NO: 1605 - protein, 12 aa, synthetic construct
  source 1..12: note = 2G4[CD28]_H1.12_L1.24 vlCDR1
RVSSSIQSTNLH

SEQ ID NO: 1606 - protein, 7 aa, synthetic construct
  source 1..7: note = 2G4[CD28]_H1.12_L1.24 vlCDR2
GTSVLAT

SEQ ID NO: 1607 - protein, 10 aa, synthetic construct
  source 1..10: note = 2G4[CD28]_H1.12_L1.24 vlCDR3
QQWSSYPLYT

SEQ ID NO: 1608 - protein, 118 aa, synthetic construct; identical to SEQ ID NO: 1478
  source 1..118: note = 2G4[CD28]_H1.12_L1.66 Variable Heavy (vh) Domain

SEQ ID NO: 1609 - protein, 5 aa, synthetic construct
  source 1..5: note = 2G4[CD28]_H1.12_L1.66 vhCDR1
VYDMS

SEQ ID NO: 1610 - protein, 17 aa, synthetic construct
  source 1..17: note = 2G4[CD28]_H1.12_L1.66 vhCDR2
TISSGGSFTHYPDSVKG

SEQ ID NO: 1611 - protein, 9 aa, synthetic construct
  source 1..9: note = 2G4[CD28]_H1.12_L1.66 vhCDR3
RSLDWYFDV

SEQ ID NO: 1612 - protein, 109 aa, synthetic construct; identical to SEQ ID NO: 1594
  source 1..109: note = 2G4[CD28]_H1.12_L1.66 Variable Light (vl) Domain

SEQ ID NO: 1613 - protein, 12 aa, synthetic construct
  source 1..12: note = 2G4[CD28]_H1.12_L1.66 vlCDR1
RVSSSIQSTNLH

SEQ ID NO: 1614 - protein, 7 aa, synthetic construct
  source 1..7: note = 2G4[CD28]_H1.12_L1.66 vlCDR2
GTSNLAT

SEQ ID NO: 1615 - protein, 10 aa, synthetic construct
  source 1..10: note = 2G4[CD28]_H1.12_L1.66 vlCDR3
QQWSSYPLYT

SEQ ID NO: 1616 - protein, 118 aa, synthetic construct; identical to SEQ ID NO: 1478
  source 1..118: note = 2G4[CD28]_H1.12_L1.68 Variable Heavy (vh) Domain

SEQ ID NO: 1617 - protein, 5 aa, synthetic construct
  source 1..5: note = 2G4[CD28]_H1.12_L1.68 vhCDR1
VYDMS

SEQ ID NO: 1618 - protein, 17 aa, synthetic construct
  source 1..17: note = 2G4[CD28]_H1.12_L1.68 vhCDR2
TISSGGSFTHYPDSVKG

SEQ ID NO: 1619 - protein, 9 aa, synthetic construct
  source 1..9: note = 2G4[CD28]_H1.12_L1.68 vhCDR3
RSLDWYFDV

SEQ ID NO: 1620 - protein, 109 aa, synthetic construct; identical to SEQ ID NO: 1596
  source 1..109: note = 2G4[CD28]_H1.12_L1.68 Variable Light (vl) Domain

SEQ ID NO: 1621 - protein, 12 aa, synthetic construct
  source 1..12: note = 2G4[CD28]_H1.12_L1.68 vlCDR1
RVSSSIQSTNLH

SEQ ID NO: 1622 - protein, 7 aa, synthetic construct
  source 1..7: note = 2G4[CD28]_H1.12_L1.68 vlCDR2
GTSNLAS

SEQ ID NO: 1623 - protein, 10 aa, synthetic construct
  source 1..10: note = 2G4[CD28]_H1.12_L1.68 vlCDR3
QQWSSYPLYT

SEQ ID NO: 1624 - protein, 118 aa, synthetic construct; identical to SEQ ID NO: 1478
  source 1..118: note = 2G4[CD28]_H1.12_L1.14 Variable Heavy (vh) Domain

SEQ ID NO: 1625 - protein, 5 aa, synthetic construct
  source 1..5: note = 2G4[CD28]_H1.12_L1.14 vhCDR1
VYDMS

SEQ ID NO: 1626 - protein, 17 aa, synthetic construct
  source 1..17: note = 2G4[CD28]_H1.12_L1.14 vhCDR2
TISSGGSFTHYPDSVKG

SEQ ID NO: 1627 - protein, 9 aa, synthetic construct
  source 1..9: note = 2G4[CD28]_H1.12_L1.14 vhCDR3
RSLDWYFDV

SEQ ID NO: 1628 - protein, 109 aa, synthetic construct; identical to SEQ ID NO: 1542
  source 1..109: note = 2G4[CD28]_H1.12_L1.14 Variable Light (vl) Domain

SEQ ID NO: 1629 - protein, 12 aa, synthetic construct
  source 1..12: note = 2G4[CD28]_H1.12_L1.14 vlCDR1
RVSSSIQSSNLH

SEQ ID NO: 1630 - protein, 7 aa, synthetic construct
  source 1..7: note = 2G4[CD28]_H1.12_L1.14 vlCDR2
GTSNLAS

SEQ ID NO: 1631 - protein, 10 aa, synthetic construct
  source 1..10: note = 2G4[CD28]_H1.12_L1.14 vlCDR3
QQWSSYPLYT

SEQ ID NO: 1632 - protein, 118 aa, synthetic construct; identical to SEQ ID NO: 1470
  source 1..118: note = 2G4[CD28]_H1.4_L1.23 Variable Heavy (vh) Domain

SEQ ID NO: 1633 - protein, 5 aa, synthetic construct
  source 1..5: note = 2G4[CD28]_H1.4_L1.23 vhCDR1
SYDMS

SEQ ID NO: 1634 - protein, 17 aa, synthetic construct
  source 1..17: note = 2G4[CD28]_H1.4_L1.23 vhCDR2
TISSGGSFTHYPDSVKG

SEQ ID NO: 1635 - protein, 9 aa, synthetic construct
  source 1..9: note = 2G4[CD28]_H1.4_L1.23 vhCDR3
RSLDWYFDV

SEQ ID NO: 1636 - protein, 109 aa, synthetic construct; identical to SEQ ID NO: 1551
  source 1..109: note = 2G4[CD28]_H1.4_L1.23 Variable Light (vl) Domain

SEQ ID NO: 1637 - protein, 12 aa, synthetic construct
  source 1..12: note = 2G4[CD28]_H1.4_L1.23 vlCDR1
RVSLSIQSSNLH

SEQ ID NO: 1638 - protein, 7 aa, synthetic construct
  source 1..7: note = 2G4[CD28]_H1.4_L1.23 vlCDR2
GTNLLAS

SEQ ID NO: 1639 - protein, 10 aa, synthetic construct
  source 1..10: note = 2G4[CD28]_H1.4_L1.23 vlCDR3
QQWSSYPLYT

SEQ ID NO: 1640 - protein, 118 aa, synthetic construct; identical to SEQ ID NO: 1470
  source 1..118: note = 2G4[CD28]_H1.4_L1.24 Variable Heavy (vh) Domain

SEQ ID NO: 1641 - protein, 5 aa, synthetic construct
  source 1..5: note = 2G4[CD28]_H1.4_L1.24 vhCDR1
SYDMS

SEQ ID NO: 1642 - protein, 17 aa, synthetic construct
  source 1..17: note = 2G4[CD28]_H1.4_L1.24 vhCDR2
TISSGGSFTHYPDSVKG

SEQ ID NO: 1643 - protein, 9 aa, synthetic construct
  source 1..9: note = 2G4[CD28]_H1.4_L1.24 vhCDR3
RSLDWYFDV

SEQ ID NO: 1644 - protein, 109 aa, synthetic construct; identical to SEQ ID NO: 1552
  source 1..109: note = 2G4[CD28]_H1.4_L1.24 Variable Light (vl) Domain

SEQ ID NO: 1645 - protein, 12 aa, synthetic construct
  source 1..12: note = 2G4[CD28]_H1.4_L1.24 vlCDR1
RVSSSIQSTNLH

SEQ ID NO: 1646 - protein, 7 aa, synthetic construct
  source 1..7: note = 2G4[CD28]_H1.4_L1.24 vlCDR2
GTSVLAT

SEQ ID NO: 1647 - protein, 10 aa, synthetic construct
  source 1..10: note = 2G4[CD28]_H1.4_L1.24 vlCDR3
QQWSSYPLYT

SEQ ID NO: 1648 - protein, 118 aa, synthetic construct; identical to SEQ ID NO: 1475
  source 1..118: note = 2G4[CD28]_H1.9_L1 Variable Heavy (vh) Domain

SEQ ID NO: 1649 - protein, 5 aa, synthetic construct
  source 1..5: note = 2G4[CD28]_H1.9_L1 vhCDR1
FRDMS

SEQ ID NO: 1650 - protein, 17 aa, synthetic construct
  source 1..17: note = 2G4[CD28]_H1.9_L1 vhCDR2
TISSGGSFTHYPDSVKG

SEQ ID NO: 1651 - protein, 9 aa, synthetic construct
  source 1..9: note = 2G4[CD28]_H1.9_L1 vhCDR3
RSGDWYFDV

SEQ ID NO: 1652 - protein, 109 aa, synthetic construct; identical to SEQ ID NO: 1012
  source 1..109: note = 2G4[CD28]_H1.9_L1 Variable Light (vl) Domain

SEQ ID NO: 1653 - protein, 12 aa, synthetic construct
  source 1..12: note = 2G4[CD28]_H1.9_L1 vlCDR1
RVSSSISSSNLH

SEQ ID NO: 1654 - protein, 7 aa, synthetic construct
  source 1..7: note = 2G4[CD28]_H1.9_L1 vlCDR2
GTSNLAS

SEQ ID NO: 1655 - protein, 10 aa, synthetic construct
  source 1..10: note = 2G4[CD28]_H1.9_L1 vlCDR3
QQWSSYPLYT

SEQ ID NO: 1656 - protein, 118 aa, synthetic construct; identical to SEQ ID NO: 1528
  source 1..118: note = 2G4[CD28]_H1.62_L1.63 Variable Heavy (vh) Domain

SEQ ID NO: 1657 - protein, 5 aa, synthetic construct
  source 1..5: note = 2G4[CD28]_H1.62_L1.63 vhCDR1
SYDMS

SEQ ID NO: 1658 - protein, 17 aa, synthetic construct
  source 1..17: note = 2G4[CD28]_H1.62_L1.63 vhCDR2
TISSGGSFTHYPDSVKG

SEQ ID NO: 1659 - protein, 9 aa, synthetic construct
  source 1..9: note = 2G4[CD28]_H1.62_L1.63 vhCDR3
RSGDWYFDV

SEQ ID NO: 1660 - protein, 109 aa, synthetic construct; identical to SEQ ID NO: 1591
  source 1..109: note = 2G4[CD28]_H1.62_L1.63 Variable Light (vl) Domain

SEQ ID NO: 1661 - protein, 12 aa, synthetic construct
  source 1..12: note = 2G4[CD28]_H1.62_L1.63 vlCDR1
RASSSISSSNLH

SEQ ID NO: 1662 - protein, 7 aa, synthetic construct
  source 1..7: note = 2G4[CD28]_H1.62_L1.63 vlCDR2
GTSNLAS

SEQ ID NO: 1663 - protein, 10 aa, synthetic construct
  source 1..10: note = 2G4[CD28]_H1.62_L1.63 vlCDR3
QQWSSYPLYT

SEQ ID NO: 1664 - protein, 118 aa, synthetic construct; identical to SEQ ID NO: 1472
  source 1..118: note = 2G4[CD28]_H1.6_L1.3 Variable Heavy (vh) Domain

SEQ ID NO: 1665 - protein, 5 aa, synthetic construct
  source 1..5: note = 2G4[CD28]_H1.6_L1.3 vhCDR1
SRDMS

SEQ ID NO: 1666 - protein, 17 aa, synthetic construct
  source 1..17: note = 2G4[CD28]_H1.6_L1.3 vhCDR2
TISSGGRFTHYPDSVKG

SEQ ID NO: 1667 - protein, 9 aa, synthetic construct
  source 1..9: note = 2G4[CD28]_H1.6_L1.3 vhCDR3
RSGDWYFDV

SEQ ID NO: 1668 - protein, 109 aa, synthetic construct; identical to SEQ ID NO: 1531
  source 1..109: note = 2G4[CD28]_H1.6_L1.3 Variable Light (vl) Domain

SEQ ID NO: 1669 - protein, 12 aa, synthetic construct
  source 1..12: note = 2G4[CD28]_H1.6_L1.3 vlCDR1
RVSSSISSSNLH

SEQ ID NO: 1670 - protein, 7 aa, synthetic construct
  source 1..7: note = 2G4[CD28]_H1.6_L1.3 vlCDR2
GTSNLAS

SEQ ID NO: 1671 - protein, 10 aa, synthetic construct
  source 1..10: note = 2G4[CD28]_H1.6_L1.3 vlCDR3
QQWSSYPLWT

SEQ ID NO: 1672 - protein, 118 aa, synthetic construct; identical to SEQ ID NO: 1527
  source 1..118: note = 2G4[CD28]_H1.61_L1.61 Variable Heavy (vh) Domain

SEQ ID NO: 1673 - protein, 5 aa, synthetic construct
  source 1..5: note = 2G4[CD28]_H1.61_L1.61 vhCDR1
SYDMS

SEQ ID NO: 1674 - protein, 17 aa, synthetic construct
  source 1..17: note = 2G4[CD28]_H1.61_L1.61 vhCDR2
TISSGGSFTHYPDSVKG

SEQ ID NO: 1675 - protein, 9 aa, synthetic construct
  source 1..9: note = 2G4[CD28]_H1.61_L1.61 vhCDR3
RSLDWYFDV

SEQ ID NO: 1676 - protein, 109 aa, synthetic construct; identical to SEQ ID NO: 1589
  source 1..109: note = 2G4[CD28]_H1.61_L1.61 Variable Light (vl) Domain

SEQ ID NO: 1677 - protein, 12 aa, synthetic construct
  source 1..12: note = 2G4[CD28]_H1.61_L1.61 vlCDR1
RASLSIQSSNLH

SEQ ID NO: 1678 - protein, 7 aa, synthetic construct
  source 1..7: note = 2G4[CD28]_H1.61_L1.61 vlCDR2
GTNLLAS

SEQ ID NO: 1679 - protein, 10 aa, synthetic construct
  source 1..10: note = 2G4[CD28]_H1.61_L1.61 vlCDR3
QQWSSYPLYT

SEQ ID NO: 1680 - protein, 118 aa, synthetic construct; identical to SEQ ID NO: 1526
  source 1..118: note = 2G4[CD28]_H1.60_L1.60 Variable Heavy (vh) Domain

SEQ ID NO: 1681 - protein, 5 aa, synthetic construct
  source 1..5: note = 2G4[CD28]_H1.60_L1.60 vhCDR1
SSDMS

SEQ ID NO: 1682 - protein, 17 aa, synthetic construct
  source 1..17: note = 2G4[CD28]_H1.60_L1.60 vhCDR2
TISSGGSFTHYPDSVKG

SEQ ID NO: 1683 - protein, 9 aa, synthetic construct
  source 1..9: note = 2G4[CD28]_H1.60_L1.60 vhCDR3
RSLDWYFDV

SEQ ID NO: 1684 - protein, 109 aa, synthetic construct; identical to SEQ ID NO: 1588
  source 1..109: note = 2G4[CD28]_H1.60_L1.60 Variable Light (vl) Domain

SEQ ID NO: 1685 - protein, 12 aa, synthetic construct
  source 1..12: note = 2G4[CD28]_H1.60_L1.60 vlCDR1
RASSSISSSNLH

SEQ ID NO: 1686 - protein, 7 aa, synthetic construct
  source 1..7: note = 2G4[CD28]_H1.60_L1.60 vlCDR2
GTSNLAS

SEQ ID NO: 1687 - protein, 10 aa, synthetic construct
  source 1..10: note = 2G4[CD28]_H1.60_L1.60 vlCDR3
QQWSSYPLWT

SEQ ID NO: 1688 - protein, 118 aa, synthetic construct; identical to SEQ ID NO: 1525
  source 1..118: note = 2G4[CD28]_H1.59_L1.60 Variable Heavy (vh) Domain

SEQ ID NO: 1689 - protein, 5 aa, synthetic construct
  source 1..5: note = 2G4[CD28]_H1.59_L1.60 vhCDR1
SRDMS

SEQ ID NO: 1690 - protein, 17 aa, synthetic construct
  source 1..17: note = 2G4[CD28]_H1.59_L1.60 vhCDR2
TISSGGRFTHYPDSVKG

SEQ ID NO: 1691 - protein, 9 aa, synthetic construct
  source 1..9: note = 2G4[CD28]_H1.59_L1.60 vhCDR3
RSGDWYFDV

SEQ ID NO: 1692 - protein, 109 aa, synthetic construct; identical to SEQ ID NO: 1588
  source 1..109: note = 2G4[CD28]_H1.59_L1.60 Variable Light (vl) Domain

SEQ ID NO: 1693 - protein, 12 aa, synthetic construct
  source 1..12: note = 2G4[CD28]_H1.59_L1.60 vlCDR1
RASSSISSSNLH

SEQ ID NO: 1694 - protein, 7 aa, synthetic construct
  source 1..7: note = 2G4[CD28]_H1.59_L1.60 vlCDR2
GTSNLAS

SEQ ID NO: 1695 - protein, 10 aa, synthetic construct
  source 1..10: note = 2G4[CD28]_H1.59_L1.60 vlCDR3
QQWSSYPLWT

SEQ ID NO: 1696 - protein, 118 aa, synthetic construct; identical to SEQ ID NO: 1480
  source 1..118: note = 2G4[CD28]_H1.14_L1.26 Variable Heavy (vh) Domain

SEQ ID NO: 1697 - protein, 5 aa, synthetic construct
  source 1..5: note = 2G4[CD28]_H1.14_L1.26 vhCDR1
SSDMS

SEQ ID NO: 1698 - protein, 17 aa, synthetic construct
  source 1..17: note = 2G4[CD28]_H1.14_L1.26 vhCDR2
TISSGGSFTHYPDSVKG

SEQ ID NO: 1699 - protein, 9 aa, synthetic construct
  source 1..9: note = 2G4[CD28]_H1.14_L1.26 vhCDR3
RSLDWYFDV

SEQ ID NO: 1700 - protein, 109 aa, synthetic construct; identical to SEQ ID NO: 1554
  source 1..109: note = 2G4[CD28]_H1.14_L1.26 Variable Light (vl) Domain

SEQ ID NO: 1701 - protein, 12 aa, synthetic construct
  source 1..12: note = 2G4[CD28]_H1.14_L1.26 vlCDR1
RASSSIQDSNLH

SEQ ID NO: 1702 - protein, 7 aa, synthetic construct
  source 1..7: note = 2G4[CD28]_H1.14_L1.26 vlCDR2
GTSNLRS

SEQ ID NO: 1703 - protein, 10 aa, synthetic construct
  source 1..10: note = 2G4[CD28]_H1.14_L1.26 vlCDR3
QQWSSYPLYT

SEQ ID NO: 1704 - protein, 118 aa, synthetic construct; identical to SEQ ID NO: 1008
  source 1..118: note = 2G4[CD28]_H1_L1.27 Variable Heavy (vh) Domain

SEQ ID NO: 1705 - protein, 5 aa, synthetic construct
  source 1..5: note = 2G4[CD28]_H1_L1.27 vhCDR1
SYDMS

SEQ ID NO: 1706 - protein, 17 aa, synthetic construct
  source 1..17: note = 2G4[CD28]_H1_L1.27 vhCDR2
TISSGGSFTHYPDSVKG

SEQ ID NO: 1707 - protein, 9 aa, synthetic construct
  source 1..9: note = 2G4[CD28]_H1_L1.27 vhCDR3
RSGDWYFDV

SEQ ID NO: 1708 - protein, 109 aa, synthetic construct; identical to SEQ ID NO: 1555
  source 1..109: note = 2G4[CD28]_H1_L1.27 Variable Light (vl) Domain

SEQ ID NO: 1709 - protein, 12 aa, synthetic construct
  source 1..12: note = 2G4[CD28]_H1_L1.27 vlCDR1
RVSSSIQGSNLH

SEQ ID NO: 1710 - protein, 7 aa, synthetic construct
  source 1..7: note = 2G4[CD28]_H1_L1.27 vlCDR2
GTSNLAS

SEQ ID NO: 1711 - protein, 10 aa, synthetic construct
  source 1..10: note = 2G4[CD28]_H1_L1.27 vlCDR3
QQWSSYPLYT

SEQ ID NO: 1712 - protein, 118 aa, synthetic construct; identical to SEQ ID NO: 1474
  source 1..118: note = 2G4[CD28]_H1.8_L1.26 Variable Heavy (vh) Domain

SEQ ID NO: 1713 - protein, 5 aa, synthetic construct
  source 1..5: note = 2G4[CD28]_H1.8_L1.26 vhCDR1
SSDMS

SEQ ID NO: 1714 - protein, 17 aa, synthetic construct
  source 1..17: note = 2G4[CD28]_H1.8_L1.26 vhCDR2
TISSGGSFTHYPDSVKG

SEQ ID NO: 1715 - protein, 9 aa, synthetic construct
  source 1..9: note = 2G4[CD28]_H1.8_L1.26 vhCDR3
RSGDWYFDV

SEQ ID NO: 1716 - protein, 109 aa, synthetic construct; identical to SEQ ID NO: 1554
  source 1..109: note = 2G4[CD28]_H1.8_L1.26 Variable Light (vl) Domain

SEQ ID NO: 1717 - protein, 12 aa, synthetic construct
  source 1..12: note = 2G4[CD28]_H1.8_L1.26 vlCDR1
RASSSIQDSNLH

SEQ ID NO: 1718 - protein, 7 aa, synthetic construct
  source 1..7: note = 2G4[CD28]_H1.8_L1.26 vlCDR2
GTSNLRS

SEQ ID NO: 1719 - protein, 10 aa, synthetic construct
  source 1..10: note = 2G4[CD28]_H1.8_L1.26 vlCDR3
QQWSSYPLYT

SEQ ID NO: 1720 - protein, 118 aa, synthetic construct; identical to SEQ ID NO: 1008
  source 1..118: note = 2G4[CD28]_H1_L1.25 Variable Heavy (vh) Domain

SEQ ID NO: 1721 - protein, 5 aa, synthetic construct
  source 1..5: note = 2G4[CD28]_H1_L1.25 vhCDR1
SYDMS

SEQ ID NO: 1722 - protein, 17 aa, synthetic construct
  source 1..17: note = 2G4[CD28]_H1_L1.25 vhCDR2
TISSGGSFTHYPDSVKG

SEQ ID NO: 1723 - protein, 9 aa, synthetic construct
  source 1..9: note = 2G4[CD28]_H1_L1.25 vhCDR3
RSGDWYFDV

SEQ ID NO: 1724 - protein, 109 aa, synthetic construct; identical to SEQ ID NO: 1553
  source 1..109: note = 2G4[CD28]_H1_L1.25 Variable Light (vl) Domain

SEQ ID NO: 1725 - protein, 12 aa, synthetic construct
  source 1..12: note = 2G4[CD28]_H1_L1.25 vlCDR1
RVSSSIQPSNLH

SEQ ID NO: 1726 - protein, 7 aa, synthetic construct
  source 1..7: note = 2G4[CD28]_H1_L1.25 vlCDR2
GTSNLAS

SEQ ID NO: 1727 - protein, 10 aa, synthetic construct
  source 1..10: note = 2G4[CD28]_H1_L1.25 vlCDR3
QQWSSYPLYT

SEQ ID NO: 1728 - protein, 118 aa, synthetic construct; identical to SEQ ID NO: 1476
  source 1..118: note = 2G4[CD28]_H1.10_L1.23 Variable Heavy (vh) Domain

SEQ ID NO: 1729 - protein, 5 aa, synthetic construct
  source 1..5: note = 2G4[CD28]_H1.10_L1.23 vhCDR1
WYDMS

SEQ ID NO: 1730 - protein, 17 aa, synthetic construct
  source 1..17: note = 2G4[CD28]_H1.10_L1.23 vhCDR2
TISSGGSFTHYPDSVKG

SEQ ID NO: 1731 - protein, 9 aa, synthetic construct
  source 1..9: note = 2G4[CD28]_H1.10_L1.23 vhCDR3
RSGDWYFDV

SEQ ID NO: 1732 - protein, 109 aa, synthetic construct; identical to SEQ ID NO: 1551
  source 1..109: note = 2G4[CD28]_H1.10_L1.23 Variable Light (vl) Domain

SEQ ID NO: 1733 - protein, 12 aa, synthetic construct
  source 1..12: note = 2G4[CD28]_H1.10_L1.23 vlCDR1
RVSLSIQSSNLH

SEQ ID NO: 1734 - protein, 7 aa, synthetic construct
  source 1..7: note = 2G4[CD28]_H1.10_L1.23 vlCDR2
GTNLLAS

SEQ ID NO: 1735 - protein, 10 aa, synthetic construct
  source 1..10: note = 2G4[CD28]_H1.10_L1.23 vlCDR3
QQWSSYPLYT

SEQ ID NO: 1736 - protein, 118 aa, synthetic construct; identical to SEQ ID NO: 1467
  source 1..118: note = 2G4[CD28]_H1.1_L1.1 Variable Heavy (vh) Domain

SEQ ID NO: 1737 - protein, 5 aa, synthetic construct
  source 1..5: note = 2G4[CD28]_H1.1_L1.1 vhCDR1
SRDMS

SEQ ID NO: 1738 - protein, 17 aa, synthetic construct
  source 1..17: note = 2G4[CD28]_H1.1_L1.1 vhCDR2
TISSGGSFTHYPDSVKG

SEQ ID NO: 1739 - protein, 9 aa, synthetic construct
  source 1..9: note = 2G4[CD28]_H1.1_L1.1 vhCDR3
RSGDWYFDV

SEQ ID NO: 1740 - protein, 109 aa, synthetic construct; identical to SEQ ID NO: 1529
  source 1..109: note = 2G4[CD28]_H1.1_L1.1 Variable Light (vl) Domain

SEQ ID NO: 1741 - protein, 12 aa, synthetic construct
  source 1..12: note = 2G4[CD28]_H1.1_L1.1 vlCDR1
RVSSSISSSNLH

SEQ ID NO: 1742 - protein, 7 aa, synthetic construct
  source 1..7: note = 2G4[CD28]_H1.1_L1.1 vlCDR2
GTSNLAS

SEQ ID NO: 1743 - protein, 10 aa, synthetic construct
  source 1..10: note = 2G4[CD28]_H1.1_L1.1 vlCDR3
QQWWSYPLYT

SEQ ID NO: 1744 - protein, 118 aa, synthetic construct; identical to SEQ ID NO: 1008
  source 1..118: note = 2G4[CD28]_H1_L1.29 Variable Heavy (vh) Domain

SEQ ID NO: 1745 - protein, 5 aa, synthetic construct
  source 1..5: note = 2G4[CD28]_H1_L1.29 vhCDR1
SYDMS

SEQ ID NO: 1746 - protein, 17 aa, synthetic construct
  source 1..17: note = 2G4[CD28]_H1_L1.29 vhCDR2
TISSGGSFTHYPDSVKG

SEQ ID NO: 1747 - protein, 9 aa, synthetic construct
  source 1..9: note = 2G4[CD28]_H1_L1.29 vhCDR3
RSGDWYFDV

SEQ ID NO: 1748 - protein, 109 aa, synthetic construct; identical to SEQ ID NO: 1557
  source 1..109: note = 2G4[CD28]_H1_L1.29 Variable Light (vl) Domain

SEQ ID NO: 1749 - protein, 12 aa, synthetic construct
  source 1..12: note = 2G4[CD28]_H1_L1.29 vlCDR1
RVSSRIVLSNLH

SEQ ID NO: 1750 - protein, 7 aa, synthetic construct
  source 1..7: note = 2G4[CD28]_H1_L1.29 vlCDR2
GTSVLAT

SEQ ID NO: 1751 - protein, 10 aa, synthetic construct
  source 1..10: note = 2G4[CD28]_H1_L1.29 vlCDR3
QQWSSYPLWT

SEQ ID NO: 1752 - protein, 30 aa, synthetic construct
  source 1..30: note = 2G4 VH HFR1
  VARIANT 30: note = P, S, R or H
EVQLLESGGGLVQPGGSLRLSCAASGFTFX

SEQ ID NO: 1753 - protein, 14 aa, synthetic construct
  source 1..14: note = 2G4 VH HFR2
  VARIANT 9: note = R or G
WVRQAPGKXLEWVS

SEQ ID NO: 1754 - protein, 17 aa, synthetic construct
  source 1..17: note = 2G4 VH HCDR2
  VARIANT 7: note = S or R
TISSGGXFTHYPDSVKG

SEQ ID NO: 1755 - protein, 32 aa, synthetic construct
  source 1..32: note = 2G4 VH HFR3
  VARIANT 31: note = V or A
RFTISRDNSKNTLYLQMNSLRAEDTAVYYCXR

SEQ ID NO: 1756 - protein, 9 aa, synthetic construct
  source 1..9: note = 2G4 VH HCDR3
  VARIANT 3: note = G, L or S
RSXDWYFDV

SEQ ID NO: 1757 - protein, 11 aa, synthetic construct
  source 1..11: note = 2G4 VH HFR4
WGAGTTVTVSS

SEQ ID NO: 1758 - protein, 23 aa, synthetic construct
  source 1..23: note = 2G4 VL LFR1
EIVLTQSPGTLSLSPGERATLSC

SEQ ID NO: 1759 - protein, 12 aa, synthetic construct
  source 1..12: note = 2G4 VL LCDR1
  VARIANT 2: note = V or A
  VARIANT 4: note = S, W, L or Y
  VARIANT 5: note = S, F or R
  VARIANT 6: note = I, G or M
  VARIANT 7: note = S, V, N, I, T or Q
  VARIANT 8: note = S, F, R, P, L, D or Q
  VARIANT 9: note = S or T
RXSXXXXXXNLH

SEQ ID NO: 1760 - protein, 15 aa, synthetic construct
  source 1..15: note = 2G4 VL LFR2
  VARIANT 12: note = P or L
WYQQKPGQSPRXLIY

SEQ ID NO: 1761 - protein, 32 aa, synthetic construct
  source 1..32: note = 2G4 VL LFR3
GVPVRFSGSGSGTDYTLTISRLEPEDFAVYYC

SEQ ID NO: 1762 - protein, 10 aa, synthetic construct
  source 1..10: note = 2G4 VL LCDR3
  VARIANT 4: note = S, W, F or H
  VARIANT 9: note = Y or W
QQWXSYPLXT

SEQ ID NO: 1763 - protein, 10 aa, synthetic construct
  source 1..10: note = 2G4 VL LFR4
FGGGTKVEIK

SEQ ID NO: 1764 - protein, 107 aa, synthetic construct
  source 1..107: note = 13G7[PDL1]_H2L2 Variable light (vl) domain
EIVLTQSPATLSLSPGERATLSCRASQSVSSYLAWYQQKPGQAPRLLIYDASNRATGIPARFSGSGSGTDFTLTISSLEPEDFAVYYCQQRGNWPPTFGQGTKVEIK

SEQ ID NO: 1765 - protein, 11 aa, synthetic construct
  source 1..11: note = 13G7[PDL1]_H2L2 vlCDR1
RASQSVSSYLA

SEQ ID NO: 1766 - protein, 7 aa, synthetic construct
  source 1..7: note = 13G7[PDL1]_H2L2 vlCDR2
DASNRAT

SEQ ID NO: 1767 - protein, 9 aa, synthetic construct
  source 1..9: note = 13G7[PDL1]_H2L2 vlCDR3
QQRGNWPPT

SEQ ID NO: 1768 - protein, 121 aa, synthetic construct
  source 1..121: note = XPL1-13G7[PD-L1]_H1.1
QVQLVESGPGLVKPSETLSLTCTVSGGSISSYFWSWIRQPPGKGLEWIGYIYYSGSTNYNPSLKSRVTISVDTSKNQFSLKLSSVTAADTAVYYCARGPLIQLWRPPFDYWGQGTLVTVSS

SEQ ID NO: 1769 - protein, 121 aa, synthetic construct
  source 1..121: note = XPL1-13G7[PD-L1]_H1.2
QVQLVESGPGLVKPSETLSLTCTVSGGSISGYFWSWIRQPPGKGLEWIGYIYYSGSTNYNPSLKSRVTISVDTSKNQFSLKLSSVTAADTAVYYCARGPLIQLWLPPFDYWGQGTLVTVSS

SEQ ID NO: 1770 - protein, 121 aa, synthetic construct
  source 1..121: note = XPL1-13G7[PD-L1]_H1.3
QVQLVESGPGLVKPSETLSLTCTVSGGSISGYFWSWIRQPPGKGLEWIGFIYYSGSTNYNPSLKSRVTISVDTSKNQFSLKLSSVTAADTAVYYCARGPLIQLWLQPFDYWGQGTLVTVSS

SEQ ID NO: 1771 - protein, 121 aa, synthetic construct
  source 1..121: note = XPL1-13G7[PD-L1]_H1.4
QVQLVESGPGLVKPSETLSLTCTVSGMSISNYFWSWIRQPPGKGLEWIGYIYYRGGTNYNPSLKSRVTISVDTSKNQFSLKLSSVTAADTAVYYCARGPLIQLWLPSFDYWGQGTLVTVSS

SEQ ID NO: 1772 - protein, 121 aa, synthetic construct
  source 1..121: note = XPL1-13G7[PD-L1]_H1.5
QVQLVESGPGLVKPSETLSLTCTVSGGSVGSYFWSWIRQPPGKGLEWIGYIYGSGATNYNPSLKSRVTISVDTSKNQFSLKLSSVTAADTAVYYCARGPLIQLWLKPFDYWGQGTLVTVSS

SEQ ID NO: 1773 - protein, 121 aa, synthetic construct
  source 1..121: note = XPL1-13G7[PD-L1]_H1.6
QVQLVESGPGLVKPSETLSLTCTVSGGSILSYFWSWIRQPPGKGLEWIGYIYYLGSTRYNPSLKSRVTISVDTSKNQFSLKLSSVTAADTAVYYCARGPLIQLWLPSFDYWGQGTLVTVSS

SEQ ID NO: 1774 - protein, 121 aa, synthetic construct
  source 1..121: note = XPL1-13G7[PD-L1]_H1.7
QVQLVESGPGLVKPSETLSLTCTVSGGSISSYFWSWIRQPPGKGLEWIGYIYYLGQTNYNPSLKSRVTISVDTSKNQFSLKLSSVTAADTAVYYCARGPLIQLWLPGFDYWGQGTLVTVSS

SEQ ID NO: 1775 - protein, 121 aa, synthetic construct
  source 1..121: note = XPL1-13G7[PD-L1]_H1.8
QVQLVESGPGLVKPSETLSLTCTVSGGSISGNFWSWIRQPPGKGLEWIGFIYYSGATNYNPSLKSRVTISVDTSKNQFSLKLSSVTAADTAVYYCARGPLIQLWLPPFDYWGQGTLVTVSS

SEQ ID NO: 1776 - protein, 121 aa, synthetic construct
  source 1..121: note = XPL1-13G7[PD-L1]_H1.9
QVQLVESGPGLVKPSETLSLTCTVSGGTISGYFWSWIRQPPGKGLEWIGYIYYSGSTAYNPSLKSRVTISVDTSKNQFSLKLSSVTAADTAVYYCARGPLIQLWLPSFDYWGQGTLVTVSS

SEQ ID NO: 1777 - protein, 121 aa, synthetic construct
  source 1..121: note = XPL1-13G7[PD-L1]_H1.10
QVQLVESGPGLVKPSETLSLTCTVSGGNISGYFWSWIRQPPGKGLEWIGYIYYGGSTSYNPSLKSRVTISVDTSKNQFSLKLSSVTAADTAVYYCARGPLIQLWLNPFDYWGQGTLVTVSS

SEQ ID NO: 1778 - protein, 121 aa, synthetic construct
  source 1..121: note = XPL1-13G7[PD-L1]_H1.11
QVQLVESGPGLVKPSETLSLTCTVSGGQISGYFWSWIRQPPGKGLEWIGYIYYGGSTSYNPSLKSRVTISVDTSKNQFSLKLSSVTAADTAVYYCARGPLIQLWLNPFDYWGQGTLVTVSS

SEQ ID NO: 1779 - protein, 121 aa, synthetic construct
  source 1..121: note = XPL1-13G7[PD-L1]_H1.12
QVQLVESGPGLVKPSETLSLTCTVSGSSISSYFWSWIRQPPGKGLEWIGYIYGSGSTNYNPSLKSRVTISVDTSKNQFSLKLSSVTAADTAVYYCARGPLIQLWLMPFDYWGQGTLVTVSS

SEQ ID NO: 1780 - protein, 121 aa, synthetic construct
  source 1..121: note = XPL1-13G7[PD-L1]_H1.13
QVQLVESGPGLVKPSETLSLTCTVSGGSISGRFWSWIRQPPGKGLEWIGYIYYRGSTNYNPSLKSRVTISVDTSKNQFSLKLSSVTAADTAVYYCARGPLIQLWLPPFDYWGQGTLVTVSS

SEQ ID NO: 1781 - protein, 121 aa, synthetic construct
  source 1..121: note = XPL1-13G7[PD-L1]_H1.14
QVQLVESGPGLVKPSETLSLTCTVSGGSISSQFWSWIRQPPGKGLEWIGYIYSTGSTNYNPSLKSRVTISVDTSKNQFSLKLSSVTAADTAVYYCARGPLIQLWLQPFDYWGQGTLVTVSS

SEQ ID NO: 1782 - protein, 121 aa, synthetic construct
  source 1..121: note = XPL1-13G7[PD-L1]_H1.15
QVQLVESGPGLVKPSETLSLTCTVSGGSMSGYFWSWIRQPPGKGLEWIGYIYYSGSTNYNPSLKSRVTISVDTSKNQFSLKLSSVTAADTAVYYCARGPLIQLWLNPFDYWGQGTLVTVSS

SEQ ID NO: 1783 - protein, 121 aa, synthetic construct
  source 1..121: note = XPL1-13G7[PD-L1]_H1.16
QVQLVESGPGLVKPSETLSLTCTVSGGSISSYFWSWIRQPPGKGLEWIGYIYYSGSTNYNPSLKSRVTISVDTSKNQFSLKLSSVTAADTAVYYCARGPLIQLWLEPFDYWGQGTLVTVSS

SEQ ID NO: 1784 - protein, 121 aa, synthetic construct
  source 1..121: note = XPL1-13G7[PD-L1]_H1.17
QVQLVESGPGLVKPSETLSLTCTVSGGSISSYFWSWIRQPPGKGLEWIGYIYYSGSTNYNPSLKSRVTISVDTSKNQFSLKLSSVTAADTAVYYCARGPLIQLWLAPFDYWGQGTLVTVSS

SEQ ID NO: 1785 - protein, 121 aa, synthetic construct
  source 1..121: note = XPL1-13G7[PD-L1]_H1.18
QVQLVESGPGLVKPSETLSLTCTVSGGSISGYFWSWIRQPPGKGLEWIGYIYYSGPTNYNPSLKSRVTISVDTSKNQFSLKLSSVTAADTAVYYCARGPLIQLWLAPFDYWGQGTLVTVSS

SEQ ID NO: 1786 - protein, 121 aa, synthetic construct
  source 1..121: note = XPL1-13G7[PD-L1]_H1.19
QVQLVESGPGLVKPSETLSLTCTVSGGSISGYFWSWIRQPPGKGLEWIGYIYYSGSTNYNPSLKSRVTISVDTSKNQFSLKLSSVTAADTAVYYCARGPLIQLWLAPFDYWGQGTLVTVSS

SEQ ID NO: 1787 - protein, 121 aa, synthetic construct
  source 1..121: note = XPL1-13G7[PD-L1]_H2.18
QVQLQESGPGLVKPSETLSLTCTVSGGSISGYFWSWIRQPPGKGLEWIGYIYYSGPTNYNPSLKSRVTISVDTSKNQFSLKLSSVTAADTAVYYCARGPLIQLWLAPFDYWGQGTLVTVSS

SEQ ID NO: 1788 - protein, 30 aa, synthetic construct
  source 1..30: note = 13G7 VH HFR1
  VARIANT 5: note = V or Q
  VARIANT 27: note = G, M or S
  VARIANT 28: note = S, T, N or Q
  VARIANT 29: note = S, G, L or M
  VARIANT 30: note = S, G or L
QVQLXESGPGLVKPSETLSLTCTVSGXXXX

SEQ ID NO: 1789 - protein, 14 aa, synthetic construct
  source 1..14: note = 13G7 VH HFR2
WIRQPPGKGLEWIG

SEQ ID NO: 1790 - protein, 16 aa, synthetic construct
  source 1..16: note = 13G7 VH HCDR2
  VARIANT 1: note = Y or F
  VARIANT 4: note = Y, F or S
  VARIANT 5: note = S, R, L, G or T
  VARIANT 7: note = S, G, A, Q or P
  VARIANT 9: note = N, R, A or S
XIYXXGXTXYNPSLKS

SEQ ID NO: 1791 - protein, 32 aa, synthetic construct
  source 1..32: note = 13G7 VH HFR3
RVTISVDTSKNQFSLKLSSVTAADTAVYYCAR

SEQ ID NO: 1792 - protein, 13 aa, synthetic construct
  source 1..13: note = 13G7 VH HCDR3
  VARIANT 8: note = R or L
  VARIANT 9: note = P, Q, K, N, M, E or A
  VARIANT 10: note = P, S or G
GPLIQLWXXXFDY

SEQ ID NO: 1793 - protein, 11 aa, synthetic construct
  source 1..11: note = 13G7 VH HFR4
WGQGTLVTVSS

SEQ ID NO: 1794 - protein, 121 aa, synthetic construct
  source 1..121: note = 2.14H9 OPT Variable heavy (vh) domain
EVQLVESGGGLVQPGGSLRLSCAASGFTFSRYWMSWVRQAPGKGLEWVANIKQDGSEKYYVDSVKGRFTISRDNAKNSLYLQMNSLRAEDTAVYYCAREGGWFGELAFDYWGQGTLVTVSS

SEQ ID NO: 1795 - protein, 5 aa, synthetic construct
  source 1..5: note = 2.14H9 OPT vhCDR1
RYWMS

SEQ ID NO: 1796 - protein, 17 aa, synthetic construct
  source 1..17: note = 2.14H9 OPT vhCDR2
NIKQDGSEKYYVDSVKG

SEQ ID NO: 1797 - protein, 12 aa, synthetic construct
  source 1..12: note = 2.14H9 OPT vhCDR3
EGGWFGELAFDY

SEQ ID NO: 1798 - protein, 108 aa, synthetic construct
  source 1..108: note = 2.14H9 OPT Variable light (vl) domain
EIVLTQSPGTLSLSPGERATLSCRASQRVSSSYLAWYQQKPGQAPRLLIYDASSRATGIPDRFSGSGSGTDFTLTISRLEPEDFAVYYCQQYGSLPWTFGQGTKVEIK

SEQ ID NO: 1799 - protein, 12 aa, synthetic construct
  source 1..12: note = 2.14H9 OPT vlCDR1
RASQRVSSSYLA

SEQ ID NO: 1800 - protein, 7 aa, synthetic construct
  source 1..7: note = 2.14H9 OPT vlCDR2
DASSRAT

SEQ ID NO: 1801 - protein, 9 aa, synthetic construct
  source 1..9: note = 2.14H9 OPT vlCDR3
QQYGSLPWT

SEQ ID NO: 1802 - protein, 118 aa, synthetic construct
  source 1..118: note = atezolizumab Variable heavy (vh) domain
EVQLVESGGGLVQPGGSLRLSCAASGFTFSDSWIHWVRQAPGKGLEWVAWISPYGGSTYYADSVKGRFTISADTSKNTAYLQMNSLRAEDTAVYYCARRHWPGGFDYWGQGTLVTVSA

SEQ ID NO: 1803 - protein, 5 aa, synthetic construct
  source 1..5: note = atezolizumab vhCDR1
DSWIH

SEQ ID NO: 1804 - protein, 17 aa, synthetic construct
  source 1..17: note = atezolizumab vhCDR2
WISPYGGSTYYADSVKG

SEQ ID NO: 1805 - protein, 9 aa, synthetic construct
  source 1..9: note = atezolizumab vhCDR3
RHWPGGFDY

SEQ ID NO: 1806 - protein, 107 aa, synthetic construct [sequence omitted]

SEQ ID NO: 1807 - protein, 11 aa, synthetic construct
  source 1..11: note = atezolizumab vlCDR1
RASQDVSTAVA

SEQ ID NO: 1808 - protein, 7 aa, synthetic construct
  source 1..7: note = atezolizumab vlCDR2
SASFLYS

SEQ ID NO: 1809 - protein, 9 aa, synthetic construct
  source 1..9: note = atezolizumab vlCDR3
QQYLYHPAT

SEQ ID NO: 1810 - protein, 120 aa, synthetic construct
  source 1..120: note = avelumab Variable heavy (vh) domain
EVQLLESGGGLVQPGGSLRLSCAASGFTFSSYIMMWVRQAPGKGLEWVSSIYPSGGITFYADTVKGRFTISRDNSKNTLYLQMNSLRAEDTAVYYCARIKLGTVTTVDYWGQGTLVTVSS

SEQ ID NO: 1811 - protein, 5 aa, synthetic construct
  source 1..5: note = avelumab vhCDR1
SYIMM

SEQ ID NO: 1812 - protein, 17 aa, synthetic construct
  source 1..17: note = avelumab vhCDR2
SIYPSGGITFYADTVKG

SEQ ID NO: 1813 - protein, 11 aa, synthetic construct
  source 1..11: note = avelumab vhCDR3
IKLGTVTTVDY

SEQ ID NO: 1814 - protein, 110 aa, synthetic construct
  source 1..110: note = avelumab Variable light (vl) domain
QSALTQPASVSGSPGQSITISCTGTSSDVGGYNYVSWYQQHPGKAPKLMIYDVSNRPSGVSNRFSGSKSGNTASLTISGLQAEDEADYYCSSYTSSSTRVFGTGTKVTVL

SEQ ID NO: 1815 - protein, 14 aa, synthetic construct
  source 1..14: note = avelumab vlCDR1
TGTSSDVGGYNYVS

SEQ ID NO: 1816 - protein, 7 aa, synthetic construct
  source 1..7: note = avelumab vlCDR2
DVSNRPS

SEQ ID NO: 1817 - protein, 10 aa, synthetic construct
  source 1..10: note = avelumab vlCDR3
SSYTSSSTRV

SEQ ID NO: 1818 - protein, 123 aa, synthetic construct
  source 1..123: note = 12A4 Variable heavy (vh) domain
QVQLVQSGAEVKKPGSSVKVSCKTSGDTFSTYAISWVRQAPGQGLEWMGGIIPIFGKAHYAQKFQGRVTITADESTSTAYMELSSLRSEDTAVYFCARKFHFVSGSPFGMDVWGQGTTVTVSS

SEQ ID NO: 1819 - protein, 5 aa, synthetic construct
  source 1..5: note = 12A4 vhCDR1
TYAIS

SEQ ID NO: 1820 - protein, 17 aa, synthetic construct
  source 1..17: note = 12A4 vhCDR2
GIIPIFGKAHYAQKFQG

SEQ ID NO: 1821 - protein, 14 aa, synthetic construct
  source 1..14: note = 12A4 vhCDR3
KFHFVSGSPFGMDV

SEQ ID NO: 1822 - protein, 106 aa, synthetic construct
  source 1..106: note = 12A4 Variable light (vl) domain
EIVLTQSPATLSLSPGERATLSCRASQSVSSYLAWYQQKPGQAPRLLIYDASNRATGIPARFSGSGSGTDFTLTISSLEPEDFAVYYCQQRSNWPTFGQGTKVEIK

SEQ ID NO: 1823 - protein, 11 aa, synthetic construct
  source 1..11: note = 12A4 vlCDR1
RASQSVSSYLA

SEQ ID NO: 1824 - protein, 7 aa, synthetic construct
  source 1..7: note = 12A4 vlCDR2
DASNRAT

SEQ ID NO: 1825 - protein, 8 aa, synthetic construct
  source 1..8: note = 12A4 vlCDR3
QQRSNWPT

SEQ ID NO: 1826 - protein, 117 aa, synthetic construct
  source 1..117: note = 3G10 Variable heavy (vh) domain
QVQLVQSGAEVKKPGASVKVSCKASGYTFTDYGFSWVRQAPGQGLEWMGWITAYNGNTNYAQKLQGRVTMTTDTSTSTVYMELRSLRSDDTAVYYCARDYFYGMDVWGQGTTVTVSS

SEQ ID NO: 1827 - protein, 5 aa, synthetic construct
  source 1..5: note = 3G10 vhCDR1
DYGFS

SEQ ID NO: 1828 - protein, 17 aa, synthetic construct
  source 1..17: note = 3G10 vhCDR2
WITAYNGNTNYAQKLQG

SEQ ID NO: 1829 - protein, 8 aa, synthetic construct
  source 1..8: note = 3G10 vhCDR3
DYFYGMDV

SEQ ID NO: 1830 - protein, 107 aa, synthetic construct
  source 1..107: note = 3G10 Variable light (vl) domain
EIVLTQSPATLSLSPGERATLSCRASQSVSSYLVWYQQKPGQAPRLLIYDASNRATGIPARFSGSGSGTDFTLTISSLEPEDFAVYYCQQRSNWPRTFGQGTKVEIK

SEQ ID NO: 1831 - protein, 11 aa, synthetic construct
  source 1..11: note = 3G10 vlCDR1
RASQSVSSYLV

SEQ ID NO: 1832 - protein, 7 aa, synthetic construct
  source 1..7: note = 3G10 vlCDR2
DASNRAT

SEQ ID NO: 1833 - protein, 9 aa, synthetic construct
  source 1..9: note = 3G10 vlCDR3
QQRSNWPRT

SEQ ID NO: 1834 - protein, 118 aa, synthetic construct
  source 1..118: note = 10A5 Variable heavy (vh) domain
QVQLVQSGAEVKKPGASVKVSCKASGYTFTSYDVHWVRQAPGQRLEWMGWLHADTGITKFSQKFQGRVTITRDTSASTAYMELSSLRSEDTAVYYCARERIQLWFDYWGQGTLVTVSS

SEQ ID NO: 1835 - protein, 5 aa, synthetic construct
  source 1..5: note = 10A5 vhCDR1
SYDVH

SEQ ID NO: 1836 - protein, 17 aa, synthetic construct
  source 1..17: note = 10A5 vhCDR2
WLHADTGITKFSQKFQG

SEQ ID NO: 1837 - protein, 9 aa, synthetic construct
  source 1..9: note = 10A5 vhCDR3
ERIQLWFDY

SEQ ID NO: 1838 - protein, 107 aa, synthetic construct
  source 1..107: note = 10A5 Variable light (vl) domain
DIQMTQSPSSLSASVGDRVTITCRASQGISSWLAWYQQKPEKAPKSLIYAASSLQSGVPSRFSGSGSGTDFTLTISSLQPEDFATYYCQQYNSYPYTFGQGTKLEIK

SEQ ID NO: 1839 - protein, 11 aa, synthetic construct
  source 1..11: note = 10A5 vlCDR1
RASQGISSWLA

SEQ ID NO: 1840 - protein, 7 aa, synthetic construct
  source 1..7: note = 10A5 vlCDR2
AASSLQS

SEQ ID NO: 1841 - protein, 9 aa, synthetic construct
  source 1..9: note = 10A5 vlCDR3
QQYNSYPYT

SEQ ID NO: 1842 - protein, 114 aa, synthetic construct
  source 1..114: note = h3D10 Var1 Variable heavy (vh) domain
QVQLVQSGAEVKKPGASVKVSCKASGYTFPDYYMNWVRQAPGQGLEWMGDIDPNYGGTNYAQKFQGRVTMTRDTSISTAYMELSRLRSDDTAVYYCARGALTDWGQGTMVTVSS

SEQ ID NO: 1843 - protein, 5 aa, synthetic construct
  source 1..5: note = h3D10 Var1 vhCDR1
DYYMN

SEQ ID NO: 1844 - protein, 17 aa, synthetic construct
  source 1..17: note = h3D10 Var1 vhCDR2
DIDPNYGGTNYAQKFQG

SEQ ID NO: 1845 - protein, 5 aa, synthetic construct
  source 1..5: note = h3D10 Var1 vhCDR3
GALTD

SEQ ID NO: 1846 - protein, 106 aa, synthetic construct
  source 1..106: note = h3D10 Var1 Variable light (vl) domain
EIVLTQSPATLSLSPGERATLSCRASSSVSYIYWFQQKPGQAPRLLIYAAFNRATGIPARFSGSGSGTDYTLTISSLEPEDFAVYYCQQWSNNPLTFGQGTKVEIK

SEQ ID NO: 1847 - protein, 10 aa, synthetic construct
  source 1..10: note = h3D10 Var1 vlCDR1
RASSSVSYIY

SEQ ID NO: 1848 - protein, 7 aa, synthetic construct
  source 1..7: note = h3D10 Var1 vlCDR2
AAFNRAT

SEQ ID NO: 1849 - protein, 9 aa, synthetic construct
  source 1..9: note = h3D10 Var1 vlCDR3
QQWSNNPLT

SEQ ID NO: 1850 - protein, 114 aa, synthetic construct
  source 1..114: note = h3D10 Var2 Variable heavy (vh) domain
QVQLVQSGAEVKKPGASVKVSCKASGYTFPDYYMNWVRQAPGQSLEWMGDIDPNYGGTNYNQKFQGRVTMTRDTSISTAYMELSRLRSDDTAVYYCARGALTDWGQGTMVTVSS

SEQ ID NO: 1851 - protein, 5 aa, synthetic construct
  source 1..5: note = h3D10 Var2 vhCDR1
DYYMN

SEQ ID NO: 1852 - protein, 17 aa, synthetic construct
  source 1..17: note = h3D10 Var2 vhCDR2
DIDPNYGGTNYNQKFQG

SEQ ID NO: 1853 - protein, 5 aa, synthetic construct
  source 1..5: note = h3D10 Var2 vhCDR3
GALTD

SEQ ID NO: 1854 - protein, 106 aa, synthetic construct
  source 1..106: note = h3D10 Var2 Variable light (vl) domain
EIVLTQSPATLSLSPGERATLSCRASSSVSYIYWFQQKPGQSPRPLIYAAFNRATGIPARFSGSGSGTDYTLTISSLEPEDFAVYYCQQWSNNPLTFGQGTKVEIK

SEQ ID NO: 1855 - protein, 10 aa, synthetic construct
  source 1..10: note = h3D10 Var2 vlCDR1
RASSSVSYIY

SEQ ID NO: 1856 - protein, 7 aa, synthetic construct
  source 1..7: note = h3D10 Var2 vlCDR2
AAFNRAT

SEQ ID NO: 1857 - protein, 9 aa, synthetic construct
  source 1..9: note = h3D10 Var2 vlCDR3
QQWSNNPLT

SEQ ID NO: 1858 - protein, 114 aa, synthetic construct; identical to SEQ ID NO: 1850
  source 1..114: note = h3D10 Var3 Variable heavy (vh) domain

SEQ ID NO: 1859 - protein, 5 aa, synthetic construct
  source 1..5: note = h3D10 Var3 vhCDR1
DYYMN

SEQ ID NO: 1860 - protein, 17 aa, synthetic construct
  source 1..17: note = h3D10 Var3 vhCDR2
DIDPNYGGTNYNQKFQG

SEQ ID NO: 1861 - protein, 5 aa, synthetic construct
  source 1..5: note = h3D10 Var3 vhCDR3
GALTD

SEQ ID NO: 1862 - protein, 106 aa, synthetic construct
  source 1..106: note = h3D10 Var3 Variable light (vl) domain
QIVLTQSPATLSLSPGERATLSCRASSSVSYIYWFQQKPGQSPRPLIYATFNLASGIPARFSGSGSGTSYTLTISRLEPEDFAVYYCQQWSNNPLTFGQGTKVEIK

SEQ ID NO: 1863 - protein, 10 aa, synthetic construct
  source 1..10: note = h3D10 Var3 vlCDR1
RASSSVSYIY

SEQ ID NO: 1864 - protein, 7 aa, synthetic construct
  source 1..7: note = h3D10 Var3 vlCDR2
ATFNLAS

SEQ ID NO: 1865 - protein, 9 aa, synthetic construct
  source 1..9: note = h3D10 Var3 vlCDR3
QQWSNNPLT

SEQ ID NO: 1866 - protein, 114 aa, synthetic construct
  source 1..114: note = h3D10 Var4 Variable heavy (vh) domain
EVQLVQSGAEVKKPGASVKVSCKASGYTFPDYYMNWVRQAPGQSLEWMGDIDPNYGGTNYNQKFQGRVTMTVDRSSSTAYMELSRLRSDDTAVYYCARGALTDWGQGTMVTVSS

SEQ ID NO: 1867 - protein, 5 aa, synthetic construct
  source 1..5: note = h3D10 Var4 vhCDR1
DYYMN

SEQ ID NO: 1868 - protein, 17 aa, synthetic construct
  source 1..17: note = h3D10 Var4 vhCDR2
DIDPNYGGTNYNQKFQG

SEQ ID NO: 1869 - protein, 5 aa, synthetic construct
  source 1..5: note = h3D10 Var4 vhCDR3
GALTD

SEQ ID NO: 1870 - protein, 106 aa, synthetic construct; identical to SEQ ID NO: 1854
  source 1..106: note = h3D10 Var4 Variable light (vl) domain

SEQ ID NO: 1871 - protein, 10 aa, synthetic construct
  source 1..10: note = h3D10 Var4 vlCDR1
RASSSVSYIY

SEQ ID NO: 1872 - protein, 7 aa, synthetic construct
  source 1..7: note = h3D10 Var4 vlCDR2
AAFNRAT

SEQ ID NO: 1873 - protein, 9 aa, synthetic construct
  source 1..9: note = h3D10 Var4 vlCDR3
QQWSNNPLT

SEQ ID NO: 1874 - protein, 114 aa, synthetic construct
  source 1..114: note = h3D10 Var5 Variable heavy (vh) domain
EVQLVESGGGLVQPGRSLRLSCTASGYTFPDYYMNWVRQAPGKGLEWVGDIDPNYGGTTYNQSVKGRFTISVDRSKSIAYLQMSSLKTEDTAVYYCARGALTDWGQGTMVTVSS

SEQ ID NO: 1875 - protein, 5 aa, synthetic construct
  source 1..5: note = h3D10 Var5 vhCDR1
DYYMN

SEQ ID NO: 1876 - protein, 17 aa, synthetic construct
  source 1..17: note = h3D10 Var5 vhCDR2
DIDPNYGGTTYNQSVKG

SEQ ID NO: 1877 - protein, 5 aa, synthetic construct
  source 1..5: note = h3D10 Var5 vhCDR3
GALTD

SEQ ID NO: 1878 - protein, 106 aa, synthetic construct
  source 1..106: note = h3D10 Var5 Variable light (vl) domain
DIQLTQSPSILSASVGDRVTITCRASSSVSYIYWFQQKPGKAPKPLIYATFNLASGVPSRFSGSGSGTSYTLTISSLQPEDFATYYCQQWSNNPLTFGQGTKVEIK

SEQ ID NO: 1879 - protein, 10 aa, synthetic construct
  source 1..10: note = h3D10 Var5 vlCDR1
RASSSVSYIY

SEQ ID NO: 1880 - protein, 7 aa, synthetic construct
  source 1..7: note = h3D10 Var5 vlCDR2
ATFNLAS

SEQ ID NO: 1881 - protein, 9 aa, synthetic construct
  source 1..9: note = h3D10 Var5 vlCDR3
QQWSNNPLT

SEQ ID NO: 1882 - protein, 114 aa, synthetic construct
  source 1..114: note = h3D10 Var6 Variable heavy (vh) domain
EVQLVESGGGLVQPGRSLRLSCTASGYTFPDYYMNWVRQAPGKGLEWVGDIDPNYGGTTYAASVKGRFTISVDRSKSIAYLQMSSLKTEDTAVYYCTRGALTDWGQGTMVTVSS

SEQ ID NO: 1883 - protein, 5 aa, synthetic construct
  source 1..5: note = h3D10 Var6 vhCDR1
DYYMN

SEQ ID NO: 1884 - protein, 17 aa, synthetic construct
  source 1..17: note = h3D10 Var6 vhCDR2
DIDPNYGGTTYAASVKG

SEQ ID NO: 1885 - protein, 5 aa, synthetic construct
  source 1..5: note = h3D10 Var6 vhCDR3
GALTD

SEQ ID NO: 1886 - protein, 106 aa, synthetic construct; identical to SEQ ID NO: 1846
  source 1..106: note = h3D10 Var6 Variable light (vl) domain

SEQ ID NO: 1887 - protein, 10 aa, synthetic construct
  source 1..10: note = h3D10 Var6 vlCDR1
RASSSVSYIY

SEQ ID NO: 1888 - protein, 7 aa, synthetic construct
  source 1..7: note = h3D10 Var6 vlCDR2
AAFNRAT

SEQ ID NO: 1889 - protein, 9 aa, synthetic construct
  source 1..9: note = h3D10 Var6 vlCDR3
QQWSNNPLT

SEQ ID NO: 1890 - protein, 114 aa, synthetic construct; identical to SEQ ID NO: 1842
  source 1..114: note = h3D10 Var7 Variable heavy (vh) domain

SEQ ID NO: 1891 - protein, 5 aa, synthetic construct
  source 1..5: note = h3D10 Var7 vhCDR1
DYYMN

SEQ ID NO: 1892 - protein, 17 aa, synthetic construct
  source 1..17: note = h3D10 Var7 vhCDR2
DIDPNYGGTNYAQKFQG

SEQ ID NO: 1893 - protein, 5 aa, synthetic construct
  source 1..5: note = h3D10 Var7 vhCDR3
GALTD

SEQ ID NO: 1894 - protein, 106 aa, synthetic construct
  source 1..106: note = h3D10 Var7 Variable light (vl) domain
DIQLTQSPSSLSASVGDRVTITCRASSGVSYIYWFQQKPGKAPKLLIYAAFNLASGVPSRFSGSGSGTEYTLTISSLQPEDFATYYCQQWSNNPLTFGQGTKVEIK

SEQ ID NO: 1895 - protein, 10 aa, synthetic construct
  source 1..10: note = h3D10 Var7 vlCDR1
RASSGVSYIY

SEQ ID NO: 1896 - protein, 7 aa, synthetic construct
  source 1..7: note = h3D10 Var7 vlCDR2
AAFNLAS

SEQ ID NO: 1897 - protein, 9 aa, synthetic construct
  source 1..9: note = h3D10 Var7 vlCDR3
QQWSNNPLT

SEQ ID NO: 1898 - protein, 114 aa, synthetic construct; identical to SEQ ID NO: 1874
  source 1..114: note = h3D10 Var8 Variable heavy (vh) domain

SEQ ID NO: 1899 - protein, 5 aa, synthetic construct
  source 1..5: note = h3D10 Var8 vhCDR1
DYYMN

SEQ ID NO: 1900 - protein, 17 aa, synthetic construct
  source 1..17: note = h3D10 Var8 vhCDR2
DIDPNYGGTTYNQSVKG

SEQ ID NO: 1901 - protein, 5 aa, synthetic construct
  source 1..5: note = h3D10 Var8 vhCDR3
GALTD

SEQ ID NO: 1902 - protein, 106 aa, synthetic construct; identical to SEQ ID NO: 1862
  source 1..106: note = h3D10 Var8 Variable light (vl) domain

SEQ ID NO: 1903 - protein, 10 aa, synthetic construct
  source 1..10: note = h3D10 Var8 vlCDR1
RASSSVSYIY

SEQ ID NO: 1904 - protein, 7 aa, synthetic construct
  source 1..7: note = h3D10 Var8 vlCDR2
ATFNLAS

SEQ ID NO: 1905 - protein, 9 aa, synthetic construct
  source 1..9: note = h3D10 Var8 vlCDR3
QQWSNNPLT

SEQ ID NO: 1906 - protein, 114 aa, synthetic construct; identical to SEQ ID NO: 1874
  source 1..114: note = h3D10 Var9 Variable heavy (vh) domain

SEQ ID NO: 1907 - protein, 5 aa, synthetic construct
  source 1..5: note = h3D10 Var9 vhCDR1
DYYMN

SEQ ID NO: 1908 - protein, 17 aa, synthetic construct
  source 1..17: note = h3D10 Var9 vhCDR2
DIDPNYGGTTYNQSVKG

SEQ ID NO: 1909 - protein, 5 aa, synthetic construct
  source 1..5: note = h3D10 Var9 vhCDR3
GALTD

SEQ ID NO: 1910 - protein, 106 aa, synthetic construct
  source 1..106: note = h3D10 Var9 Variable light (vl) domain
DIQLTQSPSSLSASVGDRVTITCRASSGVSYIYWFQQKPGKAPKPLIYAAFNLASGVPSRFSGSGSGTEYTLTISSLQPEDFATYYCQQWSNNPLTFGQGTKVEIK

SEQ ID NO: 1911 - protein, 10 aa, synthetic construct
  source 1..10: note = h3D10 Var9 vlCDR1
RASSGVSYIY

SEQ ID NO: 1912 - protein, 7 aa, synthetic construct
  source 1..7: note = h3D10 Var9 vlCDR2
AAFNLAS

SEQ ID NO: 1913 - protein, 9 aa, synthetic construct
  source 1..9: note = h3D10 Var9 vlCDR3
QQWSNNPLT

SEQ ID NO: 1914 - protein, 114 aa, synthetic construct; identical to SEQ ID NO: 1874
  source 1..114: note = h3D10 Var10 Variable heavy (vh) domain

SEQ ID NO: 1915 - protein, 5 aa, synthetic construct
  source 1..5: note = h3D10 Var10 vhCDR1
DYYMN

SEQ ID NO: 1916 - protein, 17 aa, synthetic construct
  source 1..17: note = h3D10 Var10 vhCDR2
DIDPNYGGTTYNQSVKG

SEQ ID NO: 1917 - protein, 5 aa, synthetic construct
  source 1..5: note = h3D10 Var10 vhCDR3
GALTD

SEQ ID NO: 1918 - protein, 106 aa, synthetic construct; identical to SEQ ID NO: 1878
  source 1..106: note = h3D10 Var10 Variable light (vl) domain

SEQ ID NO: 1919 - protein, 10 aa, synthetic construct
  source 1..10: note = h3D10 Var10 vlCDR1
RASSSVSYIY

SEQ ID NO: 1920 - protein, 7 aa, synthetic construct
  source 1..7: note = h3D10 Var10 vlCDR2
ATFNLAS

SEQ ID NO: 1921 - protein, 9 aa, synthetic construct
  source 1..9: note = h3D10 Var10 vlCDR3
QQWSNNPLT

SEQ ID NO: 1922 - protein, 114 aa, synthetic construct; identical to SEQ ID NO: 1882
  source 1..114: note = h3D10 Var11 Variable heavy (vh) domain

SEQ ID NO: 1923 - protein, 5 aa, synthetic construct
  source 1..5: note = h3D10 Var11 vhCDR1
DYYMN

SEQ ID NO: 1924 - protein, 17 aa, synthetic construct
  source 1..17: note = h3D10 Var11 vhCDR2
DIDPNYGGTTYAASVKG

SEQ ID NO: 1925 - protein, 5 aa, synthetic construct
  source 1..5: note = h3D10 Var11 vhCDR3
GALTD

SEQ ID NO: 1926 - protein, 106 aa, synthetic construct; identical to SEQ ID NO: 1846
  source 1..106: note = h3D10 Var11 Variable light (vl) domain

SEQ ID NO: 1927 - protein, 10 aa, synthetic construct
  source 1..10: note = h3D10 Var11 vlCDR1
RASSSVSYIY

SEQ ID NO: 1928 - protein, 7 aa, synthetic construct
  source 1..7: note = h3D10 Var11 vlCDR2
AAFNRAT

SEQ ID NO: 1929 - protein, 9 aa, synthetic construct
  source 1..9: note = h3D10 Var11 vlCDR3
QQWSNNPLT

SEQ ID NO: 1930 - protein, 114 aa, synthetic construct; identical to SEQ ID NO: 1842
  source 1..114: note = h3D10 Var12 Variable heavy (vh) domain

SEQ ID NO: 1931 - protein, 5 aa, synthetic construct
  source 1..5: note = h3D10 Var12 vhCDR1
DYYMN

SEQ ID NO: 1932 - protein, 17 aa, synthetic construct
  source 1..17: note = h3D10 Var12 vhCDR2
DIDPNYGGTNYAQKFQG

SEQ ID NO: 1933 - protein, 5 aa, synthetic construct
  source 1..5: note = h3D10 Var12 vhCDR3
GALTD

SEQ ID NO: 1934 - protein, 106 aa, synthetic construct; identical to SEQ ID NO: 1894
  source 1..106: note = h3D10 Var12 Variable light (vl) domain

SEQ ID NO: 1935 - protein, 10 aa, synthetic construct
  source 1..10: note = h3D10 Var12 vlCDR1
RASSGVSYIY

SEQ ID NO: 1936 - protein, 7 aa, synthetic construct
  source 1..7: note = h3D10 Var12 vlCDR2
AAFNLAS

SEQ ID NO: 1937 - protein, 9 aa, synthetic construct
  source 1..9: note = h3D10 Var12 vlCDR3
QQWSNNPLT

SEQ ID NO: 1938 - protein, 114 aa, synthetic construct; identical to SEQ ID NO: 1874
  source 1..114: note = h3D10 Var13 Variable heavy (vh) domain

SEQ ID NO: 1939 - protein, 5 aa, synthetic construct
  source 1..5: note = h3D10 Var13 vhCDR1
DYYMN

SEQ ID NO: 1940 - protein, 17 aa, synthetic construct
  source 1..17: note = h3D10 Var13 vhCDR2
DIDPNYGGTTYNQSVKG

SEQ ID NO: 1941 - protein, 5 aa, synthetic construct
  source 1..5: note = h3D10 Var13 vhCDR3
GALTD

SEQ ID NO: 1942 - protein, 106 aa, synthetic construct; identical to SEQ ID NO: 1862
  source 1..106: note = h3D10 Var13 Variable light (vl) domain

SEQ ID NO: 1943 - protein, 10 aa, synthetic construct
  source 1..10: note = h3D10 Var13 vlCDR1
RASSSVSYIY

SEQ ID NO: 1944 - protein, 7 aa, synthetic construct
  source 1..7: note = h3D10 Var13 vlCDR2
ATFNLAS

SEQ ID NO: 1945 - protein, 9 aa, synthetic construct
  source 1..9: note = h3D10 Var13 vlCDR3
QQWSNNPLT

SEQ ID NO: 1946 - protein, 114 aa, synthetic construct; identical to SEQ ID NO: 1866
  source 1..114: note = h3D10 Var14 Variable heavy (vh) domain

SEQ ID NO: 1947 - protein, 5 aa, synthetic construct
  source 1..5: note = h3D10 Var14 vhCDR1
DYYMN

SEQ ID NO: 1948 - protein, 17 aa, synthetic construct
  source 1..17: note = h3D10 Var14 vhCDR2
DIDPNYGGTNYNQKFQG

SEQ ID NO: 1949 - protein, 5 aa, synthetic construct
  source 1..5: note = h3D10 Var14 vhCDR3
GALTD

SEQ ID NO: 1950 - protein, 106 aa, synthetic construct; identical to SEQ ID NO: 1878
  source 1..106: note = h3D10 Var14 Variable light (vl) domain

SEQ ID NO: 1951 - protein, 10 aa, synthetic construct
  source 1..10: note = h3D10 Var14 vlCDR1
RASSSVSYIY

SEQ ID NO: 1952 - protein, 7 aa, synthetic construct
  source 1..7: note = h3D10 Var14 vlCDR2
ATFNLAS

SEQ ID NO: 1953 - protein, 9 aa, synthetic construct
  source 1..9: note = h3D10 Var14 vlCDR3
QQWSNNPLT

SEQ ID NO: 1954 - protein, 123 aa, synthetic construct
  source 1..123: note = Antibody A Variable heavy (vh) domain
QVQLVQSGAEVKKPGSSVKVSCKASGGTFSSYAISWVRQAPGQGLEWMGGIIPIFGTANYAQKFQGRVTITADKSTSTAYMELSSLRSEDTAVYYCARSPDYSPYYYYGMDVWGQGTTVTVSS

SEQ ID NO: 1955 - protein, 5 aa, synthetic construct
  source 1..5: note = Antibody A vhCDR1
SYAIS

SEQ ID NO: 1956 - protein, 17 aa, synthetic construct
  source 1..17: note = Antibody A vhCDR2
GIIPIFGTANYAQKFQG

SEQ ID NO: 1957 - protein, 14 aa, synthetic construct
  source 1..14: note = Antibody A vhCDR3
SPDYSPYYYYGMDV

SEQ ID NO: 1958 - protein, 110 aa, synthetic construct
  source 1..110: note = Antibody A Variable light (vl) domain
QSVLTQPPSASGTPGQRVTISCSGSSSNIGSNTVNWYQQLPGTAPKLLIYGNSNRPSGVPDRFSGSKSGTSASLAISGLQSEDEADYYCQSYDSSLSGSVFGGGIKLTVL

SEQ ID NO: 1959 - protein, 13 aa, synthetic construct
  source 1..13: note = Antibody A vlCDR1
SGSSSNIGSNTVN

SEQ ID NO: 1960 - protein, 7 aa, synthetic construct
  source 1..7: note = Antibody A vlCDR2
GNSNRPS

SEQ ID NO: 1961 - protein, 11 aa, synthetic construct
  source 1..11: note = Antibody A vlCDR3
QSYDSSLSGSV

SEQ ID NO: 1962 - protein, 116 aa, synthetic construct
  source 1..116: note = C5H9v2 Variable heavy (vh) domain
EVQLLESGGGLVQPGGSLRLSCAASGFTFSSYAMSWVRQAPGKGLEWVSSIWRNGIVTVYADSVKGRFTISRDNSKNTLYLQMNSLRAEDTAVYYCAKWSAAFDYWGQGTLVTVSS

SEQ ID NO: 1963 - protein, 5 aa, synthetic construct
  source 1..5: note = C5H9v2 vhCDR1
SYAMS

SEQ ID NO: 1964 - protein, 17 aa, synthetic construct
  source 1..17: note = C5H9v2 vhCDR2
SIWRNGIVTVYADSVKG

SEQ ID NO: 1965 - protein, 7 aa, synthetic construct
  source 1..7: note = C5H9v2 vhCDR3
WSAAFDY

SEQ ID NO: 1966 - protein, 107 aa, synthetic construct
  source 1..107: note = C5H9v2 Variable light (vl) domain
DIQMTQSPSSLSASVGDRVTITCRASQSISSYLNWYQQKPGKAPKLLIYAASSLQSGVPSRFSGSGSGTDFTLTISSLQPEDFATYYCQQDNGYPSTFGGGTKVEIK

SEQ ID NO: 1967 - protein, 11 aa, synthetic construct
  source 1..11: note = C5H9v2 vlCDR1
RASQSISSYLN

SEQ ID NO: 1968 - protein, 7 aa, synthetic construct
  source 1..7: note = C5H9v2 vlCDR2
AASSLQS

SEQ ID NO: 1969 - protein, 9 aa, synthetic construct
  source 1..9: note = C5H9v2 vlCDR3
QQDNGYPST

SEQ ID NO: 1970 - protein, 94 aa, synthetic construct
  source 1..94: note = Humanized 29E.2A3 Variable heavy (vh) domain
CKASGYTFTSYVMHWVKQAPGQRLEWIGYVNPFNDGTKYNEMFKGRATLTSDKSTSTAYMELSSLRSEDTAVYYCARQAWGYPWGQGTLVTVSS

SEQ ID NO: 1971 - protein, 5 aa, synthetic construct
  source 1..5: note = Humanized 29E.2A3 vhCDR1
SYVMH

SEQ ID NO: 1972 - protein, 17 aa, synthetic construct
  source 1..17: note = Humanized 29E.2A3 vhCDR2
YVNPFNDGTKYNEMFKG

SEQ ID NO: 1973 - protein, 6 aa, synthetic construct
  source 1..6: note = Humanized 29E.2A3 vhCDR3
QAWGYP

SEQ ID NO: 1974 - protein, 111 aa, synthetic construct
  source 1..111: note = Humanized 29E.2A3 Variable light (vl) domain
DIVLTQSPATLSLSPGERATLSCRATESVEYYGTSLVQWYQQKPGQPPKLLIYAASSVDSGVPSRFSGSGSGTDFTLTINSLEAEDAATYFCQQSRRVPYTFGQGTKLEIK

SEQ ID NO: 1975 - protein, 15 aa, synthetic construct
  source 1..15: note = Humanized 29E.2A3 vlCDR1
RATESVEYYGTSLVQ

SEQ ID NO: 1976 - protein, 7 aa, synthetic construct
  source 1..7: note = Humanized 29E.2A3 vlCDR2
AASSVDS

SEQ ID NO: 1977 - protein, 9 aa, synthetic construct
  source 1..9: note = Humanized 29E.2A3 vlCDR3
QQSRRVPYT

SEQ ID NO: 1978 - protein, 121 aa, synthetic construct
  source 1..121: note = 1B9 Variable heavy (vh) domain
DVQLQESGPGLVKPSQSLSLTCTVTGYSITSDHAWNWIRQVPGNKLEWMGYITYRGSTTYSPSLKSRISITRDTSKNQFFLQLNSVTTEDTATYYCARSMITTGYYVMDYWGQGTSVTVSS

SEQ ID NO: 1979 - protein, 6 aa, synthetic construct
  source 1..6: note = 1B9 vhCDR1
SDHAWN

SEQ ID NO: 1980 - protein, 16 aa, synthetic construct
  source 1..16: note = 1B9 vhCDR2
YITYRGSTTYSPSLKS

SEQ ID NO: 1981 - protein, 12 aa, synthetic construct
  source 1..12: note = 1B9 vhCDR3
SMITTGYYVMDY

SEQ ID NO: 1982 - protein, 107 aa, synthetic construct
  source 1..107: note = 1B9 Variable light (vl) domain
DIVMTQSHKFMSTSLGDRVTITCKASQDVGISVVWYQQKPGQSPKLLIYWASTRHTGVPDRFTGSGSGTDFTLTINNVQSEDLADYFCQQYSSYPLTVGAGTKLELK

SEQ ID NO: 1983 - protein, 11 aa, synthetic construct
  source 1..11: note = 1B9 vlCDR1
KASQDVGISVV

SEQ ID NO: 1984 - protein, 7 aa, synthetic construct
  source 1..7: note = 1B9 vlCDR2
WASTRHT

SEQ ID NO: 1985 - protein, 9 aa, synthetic construct
  source 1..9: note = 1B9 vlCDR3
QQYSSYPLT

SEQ ID NO: 1986 - protein, 121 aa, synthetic construct
  source 1..121: note = 4H1 Variable heavy (vh) domain
DVQLQESGPGLVKPSQSLSLTCTVTDYSITSDYAWTWIRQFPGNKLEWMGYITYRGTTRYNPSLTSRISFTRDTSKNQLFLQLNSVTTEDTGTYCCARSMITTGYYAMDYWGQGTSVTVSS

SEQ ID NO: 1987 - protein, 6 aa, synthetic construct
  source 1..6: note = 4H1 vhCDR1
SDYAWT

SEQ ID NO: 1988 - protein, 16 aa, synthetic construct
  source 1..16: note = 4H1 vhCDR2
YITYRGTTRYNPSLTS

SEQ ID NO: 1989 - protein, 12 aa, synthetic construct
  source 1..12: note = 4H1 vhCDR3
SMITTGYYAMDY

SEQ ID NO: 1990 - protein, 107 aa, synthetic construct
  source 1..107: note = 4H1 Variable light (vl) domain
DIVMTQSHKFMSTSVGDRVSISCKASQDVGISVAWYQQKPGQSPKLLIYWASTRHTGVPVRFTGSGSGTDFTLTISNVQSEDLADYFCQQYSSYPPTFGAGTKLELK

SEQ ID NO: 1991 - protein, 11 aa, synthetic construct
  source 1..11: note = 4H1 vlCDR1
KASQDVGISVA

SEQ ID NO: 1992 - protein, 7 aa, synthetic construct
  source 1..7: note = 4H1 vlCDR2
WASTRHT

SEQ ID NO: 1993 - protein, 9 aa, synthetic construct
  source 1..9: note = 4H1 vlCDR3
QQYSSYPPT

SEQ ID NO: 1994 - protein, 120 aa, synthetic construct
  source 1..120: note = mAb-42 Variable heavy (vh) domain
QVQLVQSGAEVKKPGSSVKVSCKASGGTFSSYAISWVRQAPGQGLEWMGGIIPIFGTANYAQKFQGRVTITADKSTSTAYMELSSLRSEDTAVYYCARGRQMFGAGIDFWGPGTLVTVSS

SEQ ID NO: 1995 - protein, 5 aa, synthetic construct
  source 1..5: note = mAb-42 vhCDR1
SYAIS

SEQ ID NO: 1996 - protein, 17 aa, synthetic construct
  source 1..17: note = mAb-42 vhCDR2
GIIPIFGTANYAQKFQG

SEQ ID NO: 1997 - protein, 11 aa, synthetic construct
  source 1..11: note = mAb-42 vhCDR3
GRQMFGAGIDF

SEQ ID NO: 1998 - protein, 112 aa, synthetic construct
  source 1..112: note = mAb-42 Variable light (vl) domain
NFMLTQPHSVSESPGKTVTISCTRSSGSIDSNYVQWYQQRPGSAPTTVIYEDNQRPSGVPDRFSGSIDSSSNSASLTISGLKTEDEADYYCQSYDSNNRHVIFGGGTKLTVL

SEQ ID NO: 1999 - protein, 13 aa, synthetic construct
  source 1..13: note = mAb-42 vlCDR1
TRSSGSIDSNYVQ

SEQ ID NO: 2000 - protein, 7 aa, synthetic construct
  source 1..7: note = mAb-42 vlCDR2
EDNQRPS

SEQ ID NO: 2001 - protein, 11 aa, synthetic construct
  source 1..11: note = mAb-42 vlCDR3
QSYDSNNRHVI

SEQ ID NO: 2002 - protein, 120 aa, synthetic construct
  source 1..120: note = BAP058-03 Variable heavy (vh) domain
EVQLVQSGAEVKKPGATVKISCKVSGYTFTSYWMYWVRQATGQGLEWMGRIDPNSGSTKYNEKFKNRVTITADKSTSTAYMELSSLRSEDTAVYYCARDYRKGLYAMDYWGQGTTVTVSS

SEQ ID NO: 2003 - protein, 5 aa, synthetic construct
  source 1..5: note = BAP058-03 vhCDR1
SYWMY

SEQ ID NO: 2004 - protein, 17 aa, synthetic construct
  source 1..17: note = BAP058-03 vhCDR2
RIDPNSGSTKYNEKFKN

SEQ ID NO: 2005 - protein, 11 aa, synthetic construct
  source 1..11: note = BAP058-03 vhCDR3
DYRKGLYAMDY

SEQ ID NO: 2006 - protein, 107 aa, synthetic construct
  source 1..107: note = BAP058-03 Variable light (vl) domain
EIVLTQSPDFQSVTPKEKVTITCKASQDVGTAVAWYLQKPGQSPQLLIYWASTRHTGVPDRFSGSGSGTDFTLKISRVEAEDVGVYYCQQYNSYPLTFGQGTKVEIK

SEQ ID NO: 2007 - protein, 11 aa, synthetic construct
  source 1..11: note = BAP058-03 vlCDR1
KASQDVGTAVA

SEQ ID NO: 2008 - protein, 7 aa, synthetic construct
  source 1..7: note = BAP058-03 vlCDR2
WASTRHT

SEQ ID NO: 2009 - protein, 9 aa, synthetic construct
  source 1..9: note = BAP058-03 vlCDR3
QQYNSYPLT

SEQ ID NO: 2010 - protein, 120 aa, synthetic construct
  source 1..120: note = BAP058-04 Variable heavy (vh) domain
EVQLVQSGAEVKKPGESLRISCKGSGYTFTSYWMYWVRQAPGQGLEWMGRIDPNSGSTKYNEKFKNRVTISVDTSKNQFSLKLSSVTAADTAVYYCARDYRKGLYAMDYWGQGTTVTVSS

SEQ ID NO: 2011 - protein, 5 aa, synthetic construct
  source 1..5: note = BAP058-04 vhCDR1
SYWMY

SEQ ID NO: 2012 - protein, 17 aa, synthetic construct
  source 1..17: note = BAP058-04 vhCDR2
RIDPNSGSTKYNEKFKN

SEQ ID NO: 2013 - protein, 11 aa, synthetic construct
  source 1..11: note = BAP058-04 vhCDR3
DYRKGLYAMDY

SEQ ID NO: 2014 - protein, 107 aa, synthetic construct
  source 1..107: note = BAP058-04 Variable light (vl) domain
EIVLTQSPDFQSVTPKEKVTITCKASQDVGTAVAWYLQKPGQSPQLLIYWASTRHTGVPSRFSGSGSGTDFTFTISSLQPEDIATYYCQQYNSYPLTFGQGTKVEIK

SEQ ID NO: 2015 - protein, 11 aa, synthetic construct
  source 1..11: note = BAP058-04 vlCDR1
KASQDVGTAVA

SEQ ID NO: 2016 - protein, 7 aa, synthetic construct
  source 1..7: note = BAP058-04 vlCDR2
WASTRHT

SEQ ID NO: 2017 - protein, 9 aa, synthetic construct
  source 1..9: note = BAP058-04 vlCDR3
QQYNSYPLT

SEQ ID NO: 2018 - protein, 120 aa, synthetic construct
  source 1..120: note = BAP058-06 Variable heavy (vh) domain
EVQLVQSGAEVKKPGESLRISCKGSGYTFTSYWMYWIRQPPGKGLEWIGRIDPNSGSTKYNEKFKNRVTITADKSTSTAYMELSSLRSEDTAVYYCARDYRKGLYAMDYWGQGTTVTVSS

SEQ ID NO: 2019 - protein, 5 aa, synthetic construct
  source 1..5: note = BAP058-06 vhCDR1
SYWMY

SEQ ID NO: 2020 - protein, 17 aa, synthetic construct
  source 1..17: note = BAP058-06 vhCDR2
RIDPNSGSTKYNEKFKN

SEQ ID NO: 2021 - protein, 11 aa, synthetic construct
  source 1..11: note = BAP058-06 vhCDR3
DYRKGLYAMDY

SEQ ID NO: 2022 - protein, 107 aa, synthetic construct; identical to SEQ ID NO: 2014
  source 1..107: note = BAP058-06 Variable light (vl) domain

SEQ ID NO: 2023 - protein, 11 aa, synthetic construct
  source 1..11: note = BAP058-06 vlCDR1
KASQDVGTAVA

SEQ ID NO: 2024 - protein, 7 aa, synthetic construct
  source 1..7: note = BAP058-06 vlCDR2
WASTRHT

SEQ ID NO: 2025 - protein, 9 aa, synthetic construct
  source 1..9: note = BAP058-06 vlCDR3
QQYNSYPLT

SEQ ID NO: 2026 - protein, 120 aa, synthetic construct
  source 1..120: note = BAP058-07 Variable heavy (vh) domain
QVQLVQSGAEVKKPGASVKVSCKASGYTFTSYWMYWIRQSPSRGLEWLGRIDPNSGSTKYNEKFKNRFTISRDDSKNTAYLQMNSLKTEDTAVYYCARDYRKGLYAMDYWGQGTTVTVSS

SEQ ID NO: 2027 - protein, 5 aa, synthetic construct
  source 1..5: note = BAP058-07 vhCDR1
SYWMY

SEQ ID NO: 2028 - protein, 17 aa, synthetic construct
  source 1..17: note = BAP058-07 vhCDR2
RIDPNSGSTKYNEKFKN

SEQ ID NO: 2029 - protein, 11 aa, synthetic construct
  source 1..11: note = BAP058-07 vhCDR3
DYRKGLYAMDY

SEQ ID NO: 2030 - protein, 107 aa, synthetic construct
  source 1..107: note = BAP058-07 Variable light (vl) domain
EIVLTQSPATLSLSPGERATLSCKASQDVGTAVAWYLQKPGQSPQLLIYWASTRHTGIPPRFSGSGYGTDFTLTINNIESEDAAYYFCQQYNSYPLTFGQGTKVEIK

SEQ ID NO: 2031 - protein, 11 aa, synthetic construct
  source 1..11: note = BAP058-07 vlCDR1
KASQDVGTAVA

SEQ ID NO: 2032 - protein, 7 aa, synthetic construct
  source 1..7: note = BAP058-07 vlCDR2
WASTRHT

SEQ ID NO: 2033 - protein, 9 aa, synthetic construct
  source 1..9: note = BAP058-07 vlCDR3
QQYNSYPLT

SEQ ID NO: 2034 - protein, 120 aa, synthetic construct; identical to SEQ ID NO: 2002
  source 1..120: note = BAP058-11 Variable heavy (vh) domain

SEQ ID NO: 2035 - protein, 5 aa, synthetic construct
  source 1..5: note = BAP058-11 vhCDR1
SYWMY

SEQ ID NO: 2036 - protein, 17 aa, synthetic construct
  source 1..17: note = BAP058-11 vhCDR2
RIDPNSGSTKYNEKFKN

SEQ ID NO: 2037 - protein, 11 aa, synthetic construct
  source 1..11: note = BAP058-11 vhCDR3
DYRKGLYAMDY

SEQ ID NO: 2038 - protein, 107 aa, synthetic construct
  source 1..107: note = BAP058-11 Variable light (vl) domain
DVVMTQSPLSLPVTLGQPASISCKASQDVGTAVAWYQQKPGQAPRLLIYWASTRHTGVPSRFSGSGSGTEFTLTISSLQPDDFATYYCQQYNSYPLTFGQGTKVEIK

SEQ ID NO: 2039 - protein, 11 aa, synthetic construct
  source 1..11: note = BAP058-11 vlCDR1
KASQDVGTAVA

SEQ ID NO: 2040 - protein, 7 aa, synthetic construct
  source 1..7: note = BAP058-11 vlCDR2
WASTRHT

SEQ ID NO: 2041 - protein, 9 aa, synthetic construct
  source 1..9: note = BAP058-11 vlCDR3
QQYNSYPLT

SEQ ID NO: 2042 - protein, 120 aa, synthetic construct
  source 1..120: note = BAP058-13 Variable heavy (vh) domain
EVQLVQSGAEVKKPGATVKISCKVSGYTFTSYWMYWVRQARGQRLEWIGRIDPNSGSTKYNEKFKNRFTISRDNSKNTLYLQMNSLRAEDTAVYYCARDYRKGLYAMDYWGQGTTVTVSS

SEQ ID NO: 2043 - protein, 5 aa, synthetic construct
  source 1..5: note = BAP058-13 vhCDR1
SYWMY

SEQ ID NO: 2044 - protein, 17 aa, synthetic construct
  source 1..17: note = BAP058-13 vhCDR2
RIDPNSGSTKYNEKFKN

SEQ ID NO: 2045 - protein, 11 aa, synthetic construct
  source 1..11: note = BAP058-13 vhCDR3
DYRKGLYAMDY

SEQ ID NO: 2046 - protein, 107 aa, synthetic construct
  source 1..107: note = BAP058-13 Variable light (vl) domain
AIQLTQSPSSLSASVGDRVTITCKASQDVGTAVAWYLQKPGQSPQLLIYWASTRHTGVPSRFSGSGSGTDFTFTISSLEAEDAATYYCQQYNSYPLTFGQGTKVEIK

SEQ ID NO: 2047 - protein, 11 aa, synthetic construct
  source 1..11: note = BAP058-13 vlCDR1
KASQDVGTAVA

SEQ ID NO: 2048 - protein, 7 aa, synthetic construct
  source 1..7: note = BAP058-13 vlCDR2
WASTRHT

SEQ ID NO: 2049 - protein, 9 aa, synthetic construct
  source 1..9: note = BAP058-13 vlCDR3
QQYNSYPLT

SEQ ID NO: 2050 - protein, 121 aa, synthetic construct
  source 1..121: note = H6 Variable heavy (vh) domain
QMQLVQSGAEVKKPGSSVKVSCKASGGTFSSYAISWVRQAPGQGLEWMGGIIPIFGTANYAQKFQGRVTITADESTSTAYMELSSLRSEDTAVYYCARGNIVATITPLDYWGQGTLVTVSS

SEQ ID NO: 2051 - protein, 5 aa, synthetic construct
  source 1..5: note = H6 vhCDR1
SYAIS

SEQ ID NO: 2052 - protein, 17 aa, synthetic construct
  source 1..17: note = H6 vhCDR2
GIIPIFGTANYAQKFQG

SEQ ID NO: 2053 - protein, 12 aa, synthetic construct
  source 1..12: note = H6 vhCDR3
GNIVATITPLDY

SEQ ID NO: 2054 - protein, 108 aa, synthetic construct
  source 1..108: note = H6 Variable light (vl) domain
SYELMQPPSVSVAPGKTATIACGGENIGRKTVHWYQQKPGQAPVLVIYYDSDRPSGIPERFSGSNSGNTATLTISRVEAGDEADYYCQVWDSSSDHRIFGGGTKLTVL

SEQ ID NO: 2055 - protein, 11 aa, synthetic construct
  source 1..11: note = H6 vlCDR1
GGENIGRKTVH

SEQ ID NO: 2056 - protein, 7 aa, synthetic construct
  source 1..7: note = H6 vlCDR2
YDSDRPS

SEQ ID NO: 2057 - protein, 11 aa, synthetic construct
  source 1..11: note = H6 vlCDR3
QVWDSSSDHRI

SEQ ID NO: 2058 - protein, 121 aa, synthetic construct
  source 1..121: note = RC5 Variable heavy (vh) domain
EVQLLESGGGVVQPGGSLRLSCAASGFTFSSYWMSWVRQAPGKGLEWVANIKQDGSEKYYVDSVKGRFTISRDNSKNTVSLQMNSLRAEDTAVYYCAKDRYYNFPLGMDVWGQGTTVTVSS

SEQ ID NO: 2059 - protein, 5 aa, synthetic construct
  source 1..5: note = RC5 vhCDR1
SYWMS

SEQ ID NO: 2060 - protein, 17 aa, synthetic construct
  source 1..17: note = RC5 vhCDR2
NIKQDGSEKYYVDSVKG

SEQ ID NO: 2061 - protein, 12 aa, synthetic construct
  source 1..12: note = RC5 vhCDR3
DRYYNFPLGMDV

SEQ ID NO: 2062 - protein, 107 aa, synthetic construct
  source 1..107: note = RC5 Variable light (vl) domain
AIRMTQSPSSLSASVGDRVTITCRASQSISSYLNWYQQKPGKAPKLLIYTTSSLKSGVPSRFSGSGSGTDFTLTISRLQPEDFATYYCQQSYSSTWTFGRGTKVEIK

SEQ ID NO: 2063 - protein, 11 aa, synthetic construct
  source 1..11: note = RC5 vlCDR1
RASQSISSYLN

SEQ ID NO: 2064 - protein, 7 aa, synthetic construct
  source 1..7: note = RC5 vlCDR2
TTSSLKS

SEQ ID NO: 2065 - protein, 9 aa, synthetic construct
  source 1..9: note = RC5 vlCDR3
QQSYSSTWT

SEQ ID NO: 2066 - protein, 123 aa, synthetic construct
  source 1..123: note = SH1A1Q Variable heavy (vh) domain
EVQLVQSGAEVKKPGSSVKVSCKASGGTFSSYAISWVRQAPGQGLEWMGGIIPIFGTANYAQKFQGRVTITADKSTSTAYMELSSLRSEDTAVYYCAREGTIYDSSGYSFDYWGQGTLVTVSS

SEQ ID NO: 2067 - protein, 5 aa, synthetic construct
  source 1..5: note = SH1A1Q vhCDR1
SYAIS

SEQ ID NO: 2068 - protein, 17 aa, synthetic construct
  source 1..17: note = SH1A1Q vhCDR2
GIIPIFGTANYAQKFQG

SEQ ID NO: 2069 - protein, 14 aa, synthetic construct
  source 1..14: note = SH1A1Q vhCDR3
EGTIYDSSGYSFDY

SEQ ID NO: 2070 - protein, 110 aa, synthetic construct
  source 1..110: note = SH1A1Q Variable light (vl) domain
QSVLTQPPSVSAAPGQKVTISCSGNNSNIANNYVSWYQQLPGTAPKLLIYDNNYRPSGIPDRFSGSKSGTSATLDITGLQTGDEADYYCGVWDGSLTTGVFGGGTKLTVL

SEQ ID NO: 2071 - protein, 13 aa, synthetic construct
  source 1..13: note = SH1A1Q vlCDR1
SGNNSNIANNYVS

SEQ ID NO: 2072 - protein, 7 aa, synthetic construct
  source 1..7: note = SH1A1Q vlCDR2
DNNYRPS

SEQ ID NO: 2073 - protein, 11 aa, synthetic construct
  source 1..11: note = SH1A1Q vlCDR3
GVWDGSLTTGV

SEQ ID NO: 2074 - protein, 118 aa, synthetic construct
  source 1..118: note = SH1B3 Variable heavy (vh) domain
QVQLVESGGGVVQPGRSLRLSCAASGFTFSSYAMHWVRQAPGKGLEWVAVISFDGSNKYYADSVRGRFTISRDNSKNTLYLQMNSLRTEDTAVYYCARGWLDRDIDYWGQGTLVTVSS

SEQ ID NO: 2075 - protein, 5 aa, synthetic construct
  source 1..5: note = SH1B3 vhCDR1
SYAMH

SEQ ID NO: 2076 - protein, 17 aa, synthetic construct
  source 1..17: note = SH1B3 vhCDR2
VISFDGSNKYYADSVRG

SEQ ID NO: 2077 - protein, 9 aa, synthetic construct
  source 1..9: note = SH1B3 vhCDR3
GWLDRDIDY

SEQ ID NO: 2078 - protein, 110 aa, synthetic construct
  source 1..110: note = SH1B3 Variable light (vl) domain
LPVLTQPASVSGSPGQSITISCTGTTSDIGGYDYVSWYQQHPGKAPKLMIYDVSKRPSGVSNRFSGSKSGNTASLTISGLQAEDEADYYCSSYTSSSTHVFGTGTKLTVL

SEQ ID NO: 2079 - protein, 14 aa, synthetic construct
  source 1..14: note = SH1B3 vlCDR1
TGTTSDIGGYDYVS

SEQ ID NO: 2080 - protein, 7 aa, synthetic construct
  source 1..7: note = SH1B3 vlCDR2
DVSKRPS

SEQ ID NO: 2081 - protein, 10 aa, synthetic construct
  source 1..10: note = SH1B3 vlCDR3
SSYTSSSTHV

SEQ ID NO: 2082 - protein, 118 aa, synthetic construct
  source 1..118: note = SH1D1 Variable heavy (vh) domain
EVQLVESGGGVVQPGRSLRLSCAASGFTFSSYAMHWVRQAPGKGLEWVAVISFDGSNKYYADSVRGRFTISRDNSKNTLYLQMNSLRTEDTAVYYCARGWLDRDIDYWGQGTLVTVSS

SEQ ID NO: 2083 - protein, 5 aa, synthetic construct
  source 1..5: note = SH1D1 vhCDR1
SYAMH

SEQ ID NO: 2084 - protein, 17 aa, synthetic construct
  source 1..17: note = SH1D1 vhCDR2
VISFDGSNKYYADSVRG

SEQ ID NO: 2085 - protein, 9 aa, synthetic construct
  source 1..9: note = SH1D1 vhCDR3
GWLDRDIDY

SEQ ID NO: 2086 - protein, 111 aa, synthetic construct
  source 1..111: note = SH1D1 Variable light (vl) domain
QSALTQPASVSGSPGQSITISCTGTSSDVGGYNYVSWYQQHPGKAPKLMIYDVSNRPSGVSNRFSGSKSGNTASLTISGLQAEDEADYYCSSYRSSTLGPVFGGGTKLTVL

SEQ ID NO: 2087 - protein, 14 aa, synthetic construct
  source 1..14: note = SH1D1 vlCDR1
TGTSSDVGGYNYVS

SEQ ID NO: 2088 - protein, 7 aa, synthetic construct
  source 1..7: note = SH1D1 vlCDR2
DVSNRPS

SEQ ID NO: 2089 - protein, 11 aa, synthetic construct
  source 1..11: note = SH1D1 vlCDR3
SSYRSSTLGPV

SEQ ID NO: 2090 - protein, 118 aa, synthetic construct; identical to SEQ ID NO: 2074
  source 1..118: note = SH1D2 Variable heavy (vh) domain

SEQ ID NO: 2091 - protein, 5 aa, synthetic construct
  source 1..5: note = SH1D2 vhCDR1
SYAMH

SEQ ID NO: 2092 - protein, 17 aa, synthetic construct
  source 1..17: note = SH1D2 vhCDR2
VISFDGSNKYYADSVRG

SEQ ID NO: 2093 - protein, 9 aa, synthetic construct
  source 1..9: note = SH1D2 vhCDR3
GWLDRDIDY

SEQ ID NO: 2094 - protein, 110 aa, synthetic construct
  source 1..110: note = SH1D2 Variable light (vl) domain
QAGLTQPPSVSEAPRQRVTISCSGSSSNIGNNAVNWYQQLPGKAPKLLIYYDDLLPSGVSDRFSGSKSGTSASLAISGLQSEDEADYYCAAWDDSLNGYVFGTGTKLTVL

SEQ ID NO: 2095 - protein, 13 aa, synthetic construct
  source 1..13: note = SH1D2 vlCDR1
SGSSSNIGNNAVN

SEQ ID NO: 2096 - protein, 7 aa, synthetic construct
  source 1..7: note = SH1D2 vlCDR2
YDDLLPS

SEQ ID NO: 2097 - protein, 11 aa, synthetic construct
  source 1..11: note = SH1D2 vlCDR3
AAWDDSLNGYV

SEQ ID NO: 2098 - protein, 118 aa, synthetic construct; identical to SEQ ID NO: 2082
  source 1..118: note = SH1D12 Variable heavy (vh) domain

SEQ ID NO: 2099 - protein, 5 aa, synthetic construct
  source 1..5: note = SH1D12 vhCDR1
SYAMH

SEQ ID NO: 2100 - protein, 17 aa, synthetic construct
  source 1..17: note = SH1D12 vhCDR2
VISFDGSNKYYADSVRG

SEQ ID NO: 2101 - protein, 9 aa, synthetic construct
  source 1..9: note = SH1D12 vhCDR3
GWLDRDIDY

SEQ ID NO: 2102 - protein, 110 aa, synthetic construct
  source 1..110: note = SH1D12 Variable light (vl) domain
QSALTQPRSVSGSPGQSVTISCTGTSSDVGGYNYVSWYQQHPGKAPKLMIYDVSKRPSGVPDRFSGSKSGNTASLTISGLQAEDEADYYCSSYTSSTTHVFGTGTKVTVL

SEQ ID NO: 2103 - protein, 14 aa, synthetic construct
  source 1..14: note = SH1D12 vlCDR1
TGTSSDVGGYNYVS

SEQ ID NO: 2104 - protein, 7 aa, synthetic construct
  source 1..7: note = SH1D12 vlCDR2
DVSKRPS

SEQ ID NO: 2105 - protein, 10 aa, synthetic construct
  source 1..10: note = SH1D12 vlCDR3
SSYTSSTTHV

SEQ ID NO: 2106 - protein, 118 aa, synthetic construct; identical to SEQ ID NO: 2082
  source 1..118: note = SH1E1 Variable heavy (vh) domain

SEQ ID NO: 2107 - protein, 5 aa, synthetic construct
  source 1..5: note = SH1E1 vhCDR1
SYAMH

SEQ ID NO: 2108 - protein, 17 aa, synthetic construct
  source 1..17: note = SH1E1 vhCDR2
VISFDGSNKYYADSVRG

SEQ ID NO: 2109 - protein, 9 aa, synthetic construct
  source 1..9: note = SH1E1 vhCDR3
GWLDRDIDY

SEQ ID NO: 2110 - protein, 110 aa, synthetic construct
  source 1..110: note = SH1E1 Variable light (vl) domain
QSVVTQPPSVSAAPGQKVTISCSGSSSNIGNNYVSWYQQLPGTAPKLLIYDNNKRPSGIPDRFSGSKSGTSATLGITGLQTGDEADYYCGTWDSSLSVWVFGGGTQLTVL

SEQ ID NO: 2111 - protein, 13 aa, synthetic construct
  source 1..13: note = SH1E1 vlCDR1
SGSSSNIGNNYVS

SEQ ID NO: 2112 - protein, 7 aa, synthetic construct
  source 1..7: note = SH1E1 vlCDR2
DNNKRPS

SEQ ID NO: 2113 - protein, 11 aa, synthetic construct
  source 1..11: note = SH1E1 vlCDR3
GTWDSSLSVWV

SEQ ID NO: 2114 - protein, 118 aa, synthetic construct; identical to SEQ ID NO: 2074
  source 1..118: note = SH1G9 Variable heavy (vh) domain

SEQ ID NO: 2115 - protein, 5 aa, synthetic construct
  source 1..5: note = SH1G9 vhCDR1
SYAMH

SEQ ID NO: 2116 - protein, 17 aa, synthetic construct
  source 1..17: note = SH1G9 vhCDR2
VISFDGSNKYYADSVRG

SEQ ID NO: 2117 - protein, 9 aa, synthetic construct
  source 1..9: note = SH1G9 vhCDR3
GWLDRDIDY

SEQ ID NO: 2118 - protein, 112 aa, synthetic construct
  source 1..112: note = SH1G9 Variable light (vl) domain
QSVLTQPASVSGSPGQSITISCTGTSSDVGGYNYVSWYQQHPGRAPRLMIYDVSNRPSGVSNRFSGSKSGNTASLTISGLQAEDEGDYYCSSYTSGGTLGPVFGGGTKLTVL

SEQ ID NO: 2119 - protein, 14 aa, synthetic construct
  source 1..14: note = SH1G9 vlCDR1
TGTSSDVGGYNYVS

SEQ ID NO: 2120 - protein, 7 aa, synthetic construct
  source 1..7: note = SH1G9 vlCDR2
DVSNRPS

SEQ ID NO: 2121 - protein, 12 aa, synthetic construct
  source 1..12: note = SH1G9 vlCDR3
SSYTSGGTLGPV

SEQ ID NO: 2122 - protein, 120 aa, synthetic construct
  source 1..120: note = SH1E6 Variable heavy (vh) domain
QVQLVQSGAEVKKPGSSVKVSCKASGGTFSRYGVHWVRQAPGQGLEWMGRLIPIVSMTNYAQKFQDRVSITTDKSTGTAYMELRSLTSEDTALYYCASVGQQLPWVFFAWGQGTLVTVSS

SEQ ID NO: 2123 - protein, 5 aa, synthetic construct
  source 1..5: note = SH1E6 vhCDR1
RYGVH

SEQ ID NO: 2124 - protein, 17 aa, synthetic construct
  source 1..17: note = SH1E6 vhCDR2
RLIPIVSMTNYAQKFQD

SEQ ID NO: 2125 - protein, 11 aa, synthetic construct
  source 1..11: note = SH1E6 vhCDR3
VGQQLPWVFFA

SEQ ID NO: 2126 - protein, 110 aa, synthetic construct
  source 1..110: note = SH1E6 Variable light (vl) domain
QSVVTQPPSVSAAPGQKVTISCSGSSSNIGNNYVSWYQQLPGTAPKLLIYDNNKRPSGIPDRFSGSKSGTSATLGITGLQTGDEADYYCGTWDSSLSAVVFGGGTKLTVL

SEQ ID NO: 2127 - protein, 13 aa, synthetic construct
  source 1..13: note = SH1E6 vlCDR1
SGSSSNIGNNYVS

SEQ ID NO: 2128 - protein, 7 aa, synthetic construct
  source 1..7: note = SH1E6 vlCDR2
DNNKRPS

SEQ ID NO: 2129 - protein, 11 aa, synthetic construct
  source 1..11: note = SH1E6 vlCDR3
GTWDSSLSAVV

SEQ ID NO: 2130 - protein, 118 aa, synthetic construct
  source 1..118: note = SH1A2 Variable heavy (vh) domain
QMQLVQSGGGVVQPGRSLRLSCAASGFTFSSYAMHWVRQAPGKGLEWVAVISFDGSNKYYADSVRGRFTISRDNSKNTLYLQMNSLRTEDTAVYYCARGWLDRDIDYWGQGTLVTVSS

SEQ ID NO: 2131 - protein, 5 aa, synthetic construct
  source 1..5: note = SH1A2 vhCDR1
SYAMH

SEQ ID NO: 2132 - protein, 17 aa, synthetic construct
  source 1..17: note = SH1A2 vhCDR2
VISFDGSNKYYADSVRG

SEQ ID NO: 2133 - protein, 9 aa, synthetic construct
  source 1..9: note = SH1A2 vhCDR3
GWLDRDIDY

SEQ ID NO: 2134 - protein, 110 aa, synthetic construct
  source 1..110: note = SH1A2 Variable light (vl) domain
QSVVTQPPSVSAAPGQKVTISCSGSSSNIGNNYVSWYQQVPGTAPKLLIYDNNKRPSGIPDRFSGSNSDTSATLGITGLQTGDEADYYCGTWDSSLSAWVFGGGTKLTVL

SEQ ID NO: 2135 - protein, 13 aa, synthetic construct
  source 1..13: note = SH1A2 vlCDR1
SGSSSNIGNNYVS

SEQ ID NO: 2136 - protein, 7 aa, synthetic construct
  source 1..7: note = SH1A2 vlCDR2
DNNKRPS

SEQ ID NO: 2137 - protein, 11 aa, synthetic construct
  source 1..11: note = SH1A2 vlCDR3
GTWDSSLSAWV

SEQ ID NO: 2138 - protein, 118 aa, synthetic construct
  source 1..118: note = SH1B1 Variable heavy (vh) domain
QVQLVQSGGGVVQPGRSLRLSCAASGFTFSSYAMHWVRQAPGKGLEWVAVISFDGSNKYYADSVRGRFTISRDNSKNTLYLQMNSLRTEDTAVYYCARGWLDRDIDYWGQGTLVTVSS

SEQ ID NO: 2139 - protein, 5 aa, synthetic construct
  source 1..5: note = SH1B1 vhCDR1
SYAMH

SEQ ID NO: 2140 - protein, 17 aa, synthetic construct
  source 1..17: note = SH1B1 vhCDR2
VISFDGSNKYYADSVRG

SEQ ID NO: 2141 - protein, 9 aa, synthetic construct
  source 1..9: note = SH1B1 vhCDR3
GWLDRDIDY

SEQ ID NO: 2142 - protein, 112 aa, synthetic construct
  source 1..112: note = SH1B1 Variable light (vl) domain
QSVVTQPPSVSAAPGQKVTISCSGSSSNIGNNYVSWYQQLPGTAPKLLIYDNNKRPSGIPDRFSGSKSGTSATLGITGLQTGDEADYYCGTWDSSLSAGSVVFGGGTKLTVL

SEQ ID NO: 2143 - protein, 13 aa, synthetic construct
  source 1..13: note = SH1B1 vlCDR1
SGSSSNIGNNYVS

SEQ ID NO: 2144 - protein, 7 aa, synthetic construct
  source 1..7: note = SH1B1 vlCDR2
DNNKRPS

SEQ ID NO: 2145 - protein, 13 aa, synthetic construct
  source 1..13: note = SH1B1 vlCDR3
GTWDSSLSAGSVV

SEQ ID NO: 2146 - protein, 121 aa, synthetic construct
  source 1..121: note = H6B1L Variable heavy (vh) domain
QMQLVQSGAEVKKPGSSVKVSCKASGGTFSSYAYSWVRQAPGQGLEWMGGIIPSFGTANYAQKFQGRVTITADESTSTAYMELSSLRSEDTAVYYCARGPIVATITPLDYWGQGTLVTVSS

SEQ ID NO: 2147 - protein, 5 aa, synthetic construct
  source 1..5: note = H6B1L vhCDR1
SYAYS

SEQ ID NO: 2148 - protein, 17 aa, synthetic construct
  source 1..17: note = H6B1L vhCDR2
GIIPSFGTANYAQKFQG

SEQ ID NO: 2149 - protein, 12 aa, synthetic construct
  source 1..12: note = H6B1L vhCDR3
GPIVATITPLDY

SEQ ID NO: 2150 - protein, 108 aa, synthetic construct
  source 1..108: note = H6B1L Variable light (vl) domain
SYELMQPPSVSVAPGKTATIACGGENIGRKTVHWYQQKPGQAPVLVIYYDSDRPSGIPERFSGSNSGNTATLTISRVEAGDEADYYCLVWDSSSDHRIFGGGTKLTVL

SEQ ID NO: 2151 - protein, 11 aa, synthetic construct
  source 1..11: note = H6B1L vlCDR1
GGENIGRKTVH

SEQ ID NO: 2152 - protein, 7 aa, synthetic construct
  source 1..7: note = H6B1L vlCDR2
YDSDRPS

SEQ ID NO: 2153 - protein, 11 aa, synthetic construct
  source 1..11: note = H6B1L vlCDR3
LVWDSSSDHRI

SEQ ID NO: 2154 - protein, 121 aa, synthetic construct
  source 1..121: note = H6A1 Variable heavy (vh) domain
QMQLVQSGAEVKKPGSSVKVSCKASGGTFSSYAYSWVRQAPGQGLEWMGGIIPIFGTANYAQKFQGRVTITADESTSTAYMELSSLRSEDTAVYYCARGPIVATITPLDYWGQGTLVTVSS

SEQ ID NO: 2155 - protein, 5 aa, synthetic construct
  source 1..5: note = H6A1 vhCDR1
SYAYS

SEQ ID NO: 2156 - protein, 17 aa, synthetic construct
  source 1..17: note = H6A1 vhCDR2
GIIPIFGTANYAQKFQG

SEQ ID NO: 2157 - protein, 12 aa, synthetic construct
  source 1..12: note = H6A1 vhCDR3
GPIVATITPLDY

SEQ ID NO: 2158 - protein, 108 aa, synthetic construct; identical to SEQ ID NO: 2054
  source 1..108: note = H6A1 Variable light (vl) domain

SEQ ID NO: 2159 - protein, 11 aa, synthetic construct
  source 1..11: note = H6A1 vlCDR1
GGENIGRKTVH

SEQ ID NO: 2160 - protein, 7 aa, synthetic construct
  source 1..7: note = H6A1 vlCDR2
YDSDRPS

SEQ ID NO: 2161 - protein, 11 aa, synthetic construct
  source 1..11: note = H6A1 vlCDR3
QVWDSSSDHRI

SEQ ID NO: 2162 - protein, 121 aa, synthetic construct; identical to SEQ ID NO: 2146
  source 1..121: note = H6B1 Variable heavy (vh) domain

SEQ ID NO: 2163 - protein, 5 aa, synthetic construct
  source 1..5: note = H6B1 vhCDR1
SYAYS

SEQ ID NO: 2164 - protein, 17 aa, synthetic construct
  source 1..17: note = H6B1 vhCDR2
GIIPSFGTANYAQKFQG

SEQ ID NO: 2165 - protein, 12 aa, synthetic construct
  source 1..12: note = H6B1 vhCDR3
GPIVATITPLDY

SEQ ID NO: 2166 - protein, 108 aa, synthetic construct; identical to SEQ ID NO: 2054
  source 1..108: note = H6B1 Variable light (vl) domain

SEQ ID NO: 2167 - protein, 11 aa, synthetic construct
  source 1..11: note = H6B1 vlCDR1
GGENIGRKTVH

SEQ ID NO: 2168 - protein, 7 aa, synthetic construct
  source 1..7: note = H6B1 vlCDR2
YDSDRPS

SEQ ID NO: 2169 - protein, 11 aa, synthetic construct
  source 1..11: note = H6B1 vlCDR3
QVWDSSSDHRI

SEQ ID NO: 2170 - protein, 121 aa, synthetic construct
  source 1..121: note = H6B2 Variable heavy (vh) domain
QMQLVQSGAEVKKPGSSVKVSCKASGGTFSSYAISWVRQAPGQGLEWMGGIIPAFGTANYAQKFQGRVTITADESTSTAYMELSSLRSEDTAVYYCARGPIVATITPLDYWGQGTLVTVSS

SEQ ID NO: 2171 - protein, 5 aa, synthetic construct
  source 1..5: note = H6B2 vhCDR1
SYAIS

SEQ ID NO: 2172 - protein, 17 aa, synthetic construct
  source 1..17: note = H6B2 vhCDR2
GIIPAFGTANYAQKFQG

SEQ ID NO: 2173 - protein, 12 aa, synthetic construct
  source 1..12: note = H6B2 vhCDR3
GPIVATITPLDY

SEQ ID NO: 2174 - protein, 108 aa, synthetic construct; identical to SEQ ID NO: 2054
  source 1..108: note = H6B2 Variable light (vl) domain

SEQ ID NO: 2175 - protein, 11 aa, synthetic construct
  source 1..11: note = H6B2 vlCDR1
GGENIGRKTVH

SEQ ID NO: 2176 - protein, 7 aa, synthetic construct
  source 1..7: note = H6B2 vlCDR2
YDSDRPS

SEQ ID NO: 2177 - protein, 11 aa, synthetic construct
  source 1..11: note = H6B2 vlCDR3
QVWDSSSDHRI

SEQ ID NO: 2178 - protein, 118 aa, synthetic construct
  source 1..118: note = G12 Variable heavy (vh) domain
EVQLVQSGAEVKKPGASVKVSCKASGYTFTGYYMHWVRQAPGQGLEWMGWINPNSDNTGSAQKFQGRVFMTKTTSLNTAYMELSGLRSEDTAIYYCARERSSGYFDFWGQGTLVTVSS

SEQ ID NO: 2179 - protein, 5 aa, synthetic construct
  source 1..5: note = G12 vhCDR1
GYYMH

SEQ ID NO: 2180 - protein, 17 aa, synthetic construct
  source 1..17: note = G12 vhCDR2
WINPNSDNTGSAQKFQG

SEQ ID NO: 2181 - protein, 9 aa, synthetic construct
  source 1..9: note = G12 vhCDR3
ERSSGYFDF

SEQ ID NO: 2182 - protein, 107 aa, synthetic construct
  source 1..107: note = G12 Variable light (vl) domain
DIVMTQSPSSLSASVGDRVTITCRASQSISSYLNWYQQKPGKAPKLLIYAASSLQSGVPSRFSGSGSGTDFTLTISSLQPEDFATYYCQQSYSTPITFGQGTRLEIK

SEQ ID NO: 2183 - protein, 11 aa, synthetic construct
  source 1..11: note = G12 vlCDR1
RASQSISSYLN

SEQ ID NO: 2184 - protein, 7 aa, synthetic construct
  source 1..7: note = G12 vlCDR2
AASSLQS

SEQ ID NO: 2185 - protein, 9 aa, synthetic construct
  source 1..9: note = G12 vlCDR3
QQSYSTPIT

SEQ ID NO: 2186 - protein, 118 aa, synthetic construct
  source 1..118: note = RSA1 Variable heavy (vh) domain
EVQLVQSGGGLVQPGGSLRLSCAASGFTFSSYSMNWVRQAPGKGLEWVSYISSSSSTIYYADSVKGRFTISRDNAKNSLYLQMNSLRDEDTAVYYCARGDYYYGMDVWGQGTTVTVSS

SEQ ID NO: 2187 - protein, 5 aa, synthetic construct
  source 1..5: note = RSA1 vhCDR1
SYSMN

SEQ ID NO: 2188 - protein, 17 aa, synthetic construct
  source 1..17: note = RSA1 vhCDR2
YISSSSSTIYYADSVKG

SEQ ID NO: 2189 - protein, 9 aa, synthetic construct
  source 1..9: note = RSA1 vhCDR3
GDYYYGMDV

SEQ ID NO: 2190 - protein, 108 aa, synthetic construct
  source 1..108: note = RSA1 Variable light (vl) domain
NIQMTQSPSSVSASVGDRVTITCRASQDISRWLAWYQQKPGKAPKLLIYAASSLQSGVPSRFSGSGSGTDFALTISSLQPEDFATYYCQQADSFFSITFGQGTRLEIK

SEQ ID NO: 2191 - protein, 11 aa, synthetic construct
  source 1..11: note = RSA1 vlCDR1
RASQDISRWLA

SEQ ID NO: 2192 - protein, 7 aa, synthetic construct
  source 1..7: note = RSA1 vlCDR2
AASSLQS

SEQ ID NO: 2193 - protein, 10 aa, synthetic construct
  source 1..10: note = RSA1 vlCDR3
QQADSFFSIT

SEQ ID NO: 2194 - protein, 120 aa, synthetic construct
  source 1..120: note = RA3 Variable heavy (vh) domain
QMQLVQSGAEVKKPGSSVKVSCKASGGTFSRYGVHWVRQAPGQGLEWMGRLIPIVSMTNYAQKFQDRVSITTDKSTGTAYMELRSLTSEDTALYYCASVGQQLPWVFFAWGQGTLVTVSS

SEQ ID NO: 2195 - protein, 5 aa, synthetic construct
  source 1..5: note = RA3 vhCDR1
RYGVH

SEQ ID NO: 2196 - protein, 17 aa, synthetic construct
  source 1..17: note = RA3 vhCDR2
RLIPIVSMTNYAQKFQD

SEQ ID NO: 2197 - protein, 11 aa, synthetic construct
  source 1..11: note = RA3 vhCDR3
VGQQLPWVFFA

SEQ ID NO: 2198 - protein, 107 aa, synthetic construct
  source 1..107: note = RA3 Variable light (vl) domain
DIQMTQSPSSLSASVGDRVTITCQASQDISNYLNWYQQKPGKAPKLLIYDASTLQSGVPSRFSGSGSGTDFTLTISSLQPEDFATYYCQQSYSSHWTFGQGTKVEIK

SEQ ID NO: 2199 - protein, 11 aa, synthetic construct
  source 1..11: note = RA3 vlCDR1
QASQDISNYLN

SEQ ID NO: 2200 - protein, 7 aa, synthetic construct
  source 1..7: note = RA3 vlCDR2
DASTLQS

SEQ ID NO: 2201 - protein, 9 aa, synthetic construct
  source 1..9: note = RA3 vlCDR3
QQSYSSHWT

SEQ ID NO: 2202 - protein, 119 aa, synthetic construct
  source 1..119: note = SH1E2 Variable heavy (vh) domain
EVQLVESGAEVKKPGSSVKVSCKASGGTFSSYAISWVRQAPGQGLEWMGGIIPIFGTANYAQKFQGRVTITADESTSTAYMELSSLRSEDTAVYYCARAPYYYYYMDVWGQGTTVTVSS

SEQ ID NO: 2203 - protein, 5 aa, synthetic construct
  source 1..5: note = SH1E2 vhCDR1
SYAIS

SEQ ID NO: 2204 - protein, 17 aa, synthetic construct
  source 1..17: note = SH1E2 vhCDR2
GIIPIFGTANYAQKFQG

SEQ ID NO: 2205 - protein, 10 aa, synthetic construct
  source 1..10: note = SH1E2 vhCDR3
APYYYYYMDV

SEQ ID NO: 2206 - protein, 109 aa, synthetic construct
  source 1..109: note = SH1E2 Variable light (vl) domain
QSALTQPASVSGSLGQSVTISCTGSSSDVGSYNLVSWYQQHPGKAPNLMIYDVSKRSGVSNRFSGSKSGNTASLTISGLQAEDEADYYCSSYTGISTVVFGGGTKLTVL

SEQ ID NO: 2207 - protein, 14 aa, synthetic construct
  source 1..14: note = SH1E2 vlCDR1
TGSSSDVGSYNLVS

SEQ ID NO: 2208 - protein, 6 aa, synthetic construct
  source 1..6: note = SH1E2 vlCDR2
DVSKRS

SEQ ID NO: 2209 - protein, 10 aa, synthetic construct
  source 1..10: note = SH1E2 vlCDR3
SSYTGISTVV

SEQ ID NO: 2210 - protein, 120 aa, synthetic construct; identical to SEQ ID NO: 2122
  source 1..120: note = SH1E4 Variable heavy (vh) domain

SEQ ID NO: 2211 - protein, 5 aa, synthetic construct
  source 1..5: note = SH1E4 vhCDR1
RYGVH

SEQ ID NO: 2212 - protein, 17 aa, synthetic construct
  source 1..17: note = SH1E4 vhCDR2
RLIPIVSMTNYAQKFQD

SEQ ID NO: 2213 - protein, 11 aa, synthetic construct
  source 1..11: note = SH1E4 vhCDR3
VGQQLPWVFFA

SEQ ID NO: 2214 - protein, 112 aa, synthetic construct
  source 1..112: note = SH1E4 Variable light (vl) domain
QSVLTQPPSASGSPGQSVTISCTGTSSDIGGYDSVSWYQQHPGKAPKLMIYDVSKRPSGVSNRFSGSKSGNTASLTISGLQAEDEADYYCSSYTSSSIFFYVFGTGTKVTVL

SEQ ID NO: 2215 - protein, 14 aa, synthetic construct
  source 1..14: note = SH1E4 vlCDR1
TGTSSDIGGYDSVS

SEQ ID NO: 2216 - protein, 7 aa, synthetic construct
  source 1..7: note = SH1E4 vlCDR2
DVSKRPS

SEQ ID NO: 2217 - protein, 12 aa, synthetic construct
  source 1..12: note = SH1E4 vlCDR3
SSYTSSSIFFYV

SEQ ID NO: 2218 - protein, 121 aa, synthetic construct
  source 1..121: note = SH1B11 Variable heavy (vh) domain
QVQLVQSGSELKKPGSSVKVSCKASGYSFSGYYIHWVRQAPGQGLEWMGWIDPNSGVTNYVRRFQGRVTMTRDTSLSTAYMELSGLTADDTAVYYCARDENLWQFGYLDYWGQGTLVTVSS

SEQ ID NO: 2219 - protein, 5 aa, synthetic construct
  source 1..5: note = SH1B11 vhCDR1
GYYIH

SEQ ID NO: 2220 - protein, 17 aa, synthetic construct
  source 1..17: note = SH1B11 vhCDR2
WIDPNSGVTNYVRRFQG

SEQ ID NO: 2221 - protein, 12 aa, synthetic construct
  source 1..12: note = SH1B11 vhCDR3
DENLWQFGYLDY

SEQ ID NO: 2222 - protein, 107 aa, synthetic construct
  source 1..107: note = SH1B11 Variable light (vl) domain
DIVMTQSPSSLSASIGDRVTITCRASQRISAYVNWYQQKPGKAPKVLIYAASSLRSGVPSRFSGSGSGTDFTLTISSLQPEDFATYYCQQTYSSPWTFGQGTKVEIK

SEQ ID NO: 2223 - protein, 11 aa, synthetic construct
  source 1..11: note = SH1B11 vlCDR1
RASQRISAYVN

SEQ ID NO: 2224 - protein, 7 aa, synthetic construct
  source 1..7: note = SH1B11 vlCDR2
AASSLRS

SEQ ID NO: 2225 - protein, 9 aa, synthetic construct
  source 1..9: note = SH1B11 vlCDR3
QQTYSSPWT

SEQ ID NO: 2226 - protein, 119 aa, synthetic construct
  source 1..119: note = SH1C8 Variable heavy (vh) domain
EVQLVESGGGVVQPGRSLRLSCAASGFTFSSYAMHWVRQAPGKGLEWVAVISYDGSNKYYADSVKGRFTISRDNSKNTLYLQMNSLRAEDTAVYYCARGQWLVTELDYWGQGTLVTVSS

SEQ ID NO: 2227 - protein, 5 aa, synthetic construct
  source 1..5: note = SH1C8 vhCDR1
SYAMH

SEQ ID NO: 2228 - protein, 17 aa, synthetic construct
  source 1..17: note = SH1C8 vhCDR2
VISYDGSNKYYADSVKG

SEQ ID NO: 2229 - protein, 10 aa, synthetic construct
  source 1..10: note = SH1C8 vhCDR3
GQWLVTELDY

SEQ ID NO: 2230 - protein, 111 aa, synthetic construct
  source 1..111: note = SH1C8 Variable light (vl) domain
QSVVTQPPSVSAAPGQKVTISCSGSSSDIGNHYVSWYQQLPGTAPKLLIYDNNQRPSGIPDRFSGSKSGTSATLAITGLQTGDEADYYCGTWDNSLSPHLLFGGGTKLTVL

SEQ ID NO: 2231 - protein, 13 aa, synthetic construct
  source 1..13: note = SH1C8 vlCDR1
SGSSSDIGNHYVS

SEQ ID NO: 2232 - protein, 7 aa, synthetic construct
  source 1..7: note = SH1C8 vlCDR2
DNNQRPS

SEQ ID NO: 2233 - protein, 12 aa, synthetic construct
  source 1..12: note = SH1C8 vlCDR3
GTWDNSLSPHLL

SEQ ID NO: 2234 - protein, 123 aa, synthetic construct
  source 1..123: note = H1H9364P2 Variable heavy (vh) domain
EVQLVESGGGLVQPGRSLRLSCAASGFTFDDYALHWVRQAPGKGLEWVSGISWTGGTIDYADSVKGRFTISRDNAKNSLYLQMSSLRTEDTAIYYCTRDIRGNWKYGGWFDPWGQGTLVTVSS

SEQ ID NO: 2235 - protein, 5 aa, synthetic construct
  source 1..5: note = H1H9364P2 vhCDR1
DYALH

SEQ ID NO: 2236 - protein, 17 aa, synthetic construct
  source 1..17: note = H1H9364P2 vhCDR2
GISWTGGTIDYADSVKG

SEQ ID NO: 2237 - protein, 14 aa, synthetic construct
  source 1..14: note = H1H9364P2 vhCDR3
DIRGNWKYGGWFDP

SEQ ID NO: 2238 - protein, 108 aa, synthetic construct
  source 1..108: note = H1H9364P2 Variable light (vl) domain
DIQMTQSPSSLSASVGDRVTITCRASQSISSYLNWYQQKPGKAPKLLIYAASSLQSGVPSRFSGSGSGTDFTLTISSLQPEDFATYYCQQSYSTPPITFGQGTRLEIK

SEQ ID NO: 2239 - protein, 11 aa, synthetic construct
  source 1..11: note = H1H9364P2 vlCDR1
RASQSISSYLN

SEQ ID NO: 2240 - protein, 7 aa, synthetic construct
  source 1..7: note = H1H9364P2 vlCDR2
AASSLQS

SEQ ID NO: 2241 - protein, 10 aa, synthetic construct
  source 1..10: note = H1H9364P2 vlCDR3
QQSYSTPPIT

SEQ ID NO: 2242 - protein, 120 aa, synthetic construct
  source 1..120: note = H1H9373P2 Variable heavy (vh) domain
QVQLVQSGTEVKKPGASVKVSCKASGYTFTAYYMHWVRQAPGQGLDWMGWISPNSGFTNYAQKFQGRVTMTRDTSINTFYMELSGLRSDDTAVYYCAREGSTHHNSFDPWGQGTLVTVSS

SEQ ID NO: 2243 - protein, 5 aa, synthetic construct
  source 1..5: note = H1H9373P2 vhCDR1
AYYMH

SEQ ID NO: 2244 - protein, 17 aa, synthetic construct
  source 1..17: note = H1H9373P2 vhCDR2
WISPNSGFTNYAQKFQG

SEQ ID NO: 2245 - protein, 11 aa, synthetic construct
  source 1..11: note = H1H9373P2 vhCDR3
EGSTHHNSFDP

SEQ ID NO: 2246 - protein, 108 aa, synthetic construct; identical to SEQ ID NO: 2238
  source 1..108: note = H1H9373P2 Variable light (vl) domain

SEQ ID NO: 2247 - protein, 11 aa, synthetic construct
  source 1..11: note = H1H9373P2 vlCDR1
RASQSISSYLN

SEQ ID NO: 2248 - protein, 7 aa, synthetic construct
  source 1..7: note = H1H9373P2 vlCDR2
AASSLQS

SEQ ID NO: 2249 - protein, 10 aa, synthetic construct
  source 1..10: note = H1H9373P2 vlCDR3
QQSYSTPPIT

SEQ ID NO: 2250 - protein, 120 aa, synthetic construct
  source 1..120: note = H1H8314N Variable heavy (vh) domain
EVQLVESGGGVVRPGGSLRLSCAASGFTFDDYGMTWVRQAPGRGLEWVSGIHWHGKRTGYADSVKGRFTISRDNAKKSLYLQMNSLKGEDTALYHCVRGGMSTGDWFDPWGQGTLVIVSS

SEQ ID NO: 2251 - protein, 5 aa, synthetic construct
  source 1..5: note = H1H8314N vhCDR1
DYGMT

SEQ ID NO: 2252 - protein, 17 aa, synthetic construct
  source 1..17: note = H1H8314N vhCDR2
GIHWHGKRTGYADSVKG

SEQ ID NO: 2253 - protein, 11 aa, synthetic construct
  source 1..11: note = H1H8314N vhCDR3
GGMSTGDWFDP

SEQ ID NO: 2254 - protein, 108 aa, synthetic construct
  source 1..108: note = H1H8314N Variable light (vl) domain
DIQMTQSPSSLSASLGDRVTITCRASQSINSYLNWYQQKPGKAPKLLIYVASSLQSGVPSRFSGSGSGTEFTLTISNLQPEDFATYYCQQSYSTPPITFGQGTRLEIK

SEQ ID NO: 2255 - protein, 11 aa, synthetic construct
  source 1..11: note = H1H8314N vlCDR1
RASQSINSYLN

SEQ ID NO: 2256 - protein, 7 aa, synthetic construct
  source 1..7: note = H1H8314N vlCDR2
VASSLQS

SEQ ID NO: 2257 - protein, 10 aa, synthetic construct
  source 1..10: note = H1H8314N vlCDR3
QQSYSTPPIT

SEQ ID NO: 2258 - protein, 119 aa, synthetic construct
  source 1..119: note = PDL1.3.1 Variable heavy (vh) domain
EVQLQQSGTELVKPGASVKLSCTTSGFNIQDTYMHWVKQRPEQGLEWIGWIDPANGNTKYDPKFQGKATIIADTSSNTAYLQLRGLTSEDTAVYYCARSGVSTAHFDYWGQGTTLTVSS

SEQ ID NO: 2259 - protein, 5 aa, synthetic construct
  source 1..5: note = PDL1.3.1 vhCDR1
DTYMH

SEQ ID NO: 2260 - protein, 17 aa, synthetic construct
  source 1..17: note = PDL1.3.1 vhCDR2
WIDPANGNTKYDPKFQG

SEQ ID NO: 2261 - protein, 10 aa, synthetic construct
  source 1..10: note = PDL1.3.1 vhCDR3
SGVSTAHFDY

SEQ ID NO: 2262 - protein, 106 aa, synthetic construct
  source 1..106: note = PDL1.3.1 Variable light (vl) domain
QIVLSQSPAILSASPGEKVTMTCRASSSVSFMHWYQQKPGSSPKPWIYATSNLASGVPTRFSGSGSGTSYSLTLSRVEAEDAATYYCQQWSSYPRTFGGGTKLEIK

SEQ ID NO: 2263 - protein, 10 aa, synthetic construct
  source 1..10: note = PDL1.3.1 vlCDR1
RASSSVSFMH

SEQ ID NO: 2264 - protein, 7 aa, synthetic construct
  source 1..7: note = PDL1.3.1 vlCDR2
ATSNLAS

SEQ ID NO: 2265 - protein, 9 aa, synthetic construct
  source 1..9: note = PDL1.3.1 vlCDR3
QQWSSYPRT

SEQ ID NO: 2266 - protein, 120 aa, synthetic construct; identical to SEQ ID NO: 85
  source 1..120: note = 16G11[PDL2]_H3 Variable heavy (vh) domain

SEQ ID NO: 2267 - protein, 6 aa, synthetic construct
  source 1..6: note = 16G11[PDL2]_H3 vhCDR1
SSNWWS

SEQ ID NO: 2268 - protein, 16 aa, synthetic construct
  source 1..16: note = 16G11[PDL2]_H3 vhCDR2
EIFHIGSTNYNPSLKS

SEQ ID NO: 2269 - protein, 11 aa, synthetic construct
  source 1..11: note = 16G11[PDL2]_H3 vhCDR3
VSFGDSYYFDY

SEQ ID NO: 2270 - protein, 120 aa, synthetic construct
  source 1..120: note = XPL2-16G11[PD-L2]_H1.1
QVQLVESGPGLVKPSGTLSLTCAVSGGSLSSANWWSWVRQPPGKGLEWIGEIFHIGVMNYNPSLKSRVTISVDKSKNQFSLNLSSVTAADTAVYYCARVSFGDSYYFDYWGQGTLVTVSS

SEQ ID NO: 2271 - protein, 120 aa, synthetic construct
  source 1..120: note = XPL2-16G11[PD-L2]_H1.2
QVQLVESGPGLVKPSGTLSLTCAVSGGSISSSFWWSWVRQPPGKGLEWIGEIFHIGLVNYNPSLKSRVTISVDKSKNQFSLNLSSVTAADTAVYYCARVSFGDSYYFDYWGQGTLVTVSS

SEQ ID NO: 2272 - protein, 120 aa, synthetic construct
  source 1..120: note = XPL2-16G11[PD-L2]_H1.3
QVQLVESGPGLVKPSGTLSLTCAVSGDSISSLNWWSWVRQPPGKGLEWIGEIFAIGSTNYNPSLKSRVTISVDKSKNQFSLNLSSVTAADTAVYYCARVSFGDSYYFDYWGQGTLVTVSS

SEQ ID NO: 2273 - protein, 120 aa, synthetic construct
  source 1..120: note = XPL2-16G11[PD-L2]_H1.4
QVQLVESGPGLVKPSGTLSLTCAVSGASISSSNWWSWVRQPPGKGLEWIGEIFHIGLTNYNPSLKSRVTISVDKSKNQFSLNLSSVTAADTAVYYCARVSFGDSYYFDYWGQGTLVTVSS

SEQ ID NO: 2274 - protein, 120 aa, synthetic construct
  source 1..120: note = XPL2-16G11[PD-L2]_H1.5
QVQLVESGPGLVKPSGTLSLTCAVSGASISSSNWWSWVRQPPGKGLEWIGEIFHIGITNYNPSLKSRVTISVDKSKNQFSLNLSSVTAADTAVYYCARVSFGDSYYFDYWGQGTLVTVSS

SEQ ID NO: 2275 - protein, 120 aa, synthetic construct
  source 1..120: note = XPL2-16G11[PD-L2]_H1.6
QVQLVESGPGLVKPSGTLSLTCAVSGASISSSNWWSWVRQPPGKGLEWIGEIFHIGVTNYNPSLKSRVTISVDKSKNQFSLNLSSVTAADTAVYYCARVSFGDSYYFDYWGQGTLVTVSS

SEQ ID NO: 2276 - protein, 120 aa, synthetic construct
  source 1..120: note = XPL2-16G11[PD-L2]_H1.7
QVQLVESGPGLVKPSGTLSLTCAVSGGSISSSNWWGWVRQPPGKGLEWIGEIFHIGLTNYNPSLKSRVTISVDKSKNQFSLNLSSVTAADTAVYYCARVSFGDSYYFDYWGQGTLVTVSS

SEQ ID NO: 2277 - protein, 120 aa, synthetic construct
  source 1..120: note = XPL2-16G11[PD-L2]_H1.8
QVQLVESGPGLVKPSGTLSLTCAVSGISISSSNWWSWVRQPPGKGLEWIGEIFHIGSTNYNPSLKSRVTISVDKSKNQFSLNLSSVTAADTAVYYCARVSFGDSYYFDYWGQGTLVTVSS

SEQ ID NO: 2278 - protein, 120 aa, synthetic construct
  source 1..120: note = XPL2-16G11[PD-L2]_H1.9
QVQLVESGPGLVKPSGTLSLTCAVSGTSILSSNWWSWVRQPPGKGLEWIGEIFHIGSTNYNPSLKSRVTISVDKSKNQFSLNLSSVTAADTAVYYCARVSFGDSYYFDYWGQGTLVTVSS

SEQ ID NO: 2279 - protein, 120 aa, synthetic construct
  source 1..120: note = XPL2-16G11[PD-L2]_H1.10
QVQLVESGPGLVKPSGTLSLTCAVSGGSISSSNWWSWVRQPPGKGLEWIGEIFPIGSTNYNPSLKSRVTISVDKSKNQFSLNLSSVTAADTAVYYCARVSFGVSYYFDYWGQGTLVTVSS

SEQ ID NO: 2280 - protein, 120 aa, synthetic construct
  source 1..120: note = XPL2-16G11[PD-L2]_H1.11
QVQLVESGPGLVKPSGTLSLTCAVSGGAISSSNWWSWVRQPPGKGLEWIGEIFGIGSTNYNPSLKSRVTISVDKSKNQFSLNLSSVTAADTAVYYCARVSFGDSYYLDYWGQGTLVTVSS

SEQ ID NO: 2281 - protein, 120 aa, synthetic construct
  source 1..120: note = XPL2-16G11[PD-L2]_H1.12
QVQLVESGPGLVKPSGTLSLTCAVSGGSISSNNWWSWVRQPPGKGLEWIGEIFHIGSTNYNPSLKSRVTISVDKSKNQFSLNLSSVTAADTAVYYCARVSFGDSYYTDYWGQGTLVTVSS

SEQ ID NO: 2282 - protein, 120 aa, synthetic construct
  source 1..120: note = XPL2-16G11[PD-L2]_H1.13
QVQLVESGPGLVKPSGTLSLTCAVSGGSISSANWWSWVRQPPGKGLEWIGEIFHIGLTNYNPSLKSRVTISVDKSKNQFSLNLSSVTAADTAVYYCARVSFGLSYYFDYWGQGTLVTVSS

SEQ ID NO: 2283 - protein, 120 aa, synthetic construct
  source 1..120: note = XPL2-16G11[PD-L2]_H1.14
QVQLVESGPGLVKPSGTLSLTCAVSGGSISSPNWWSWVRQPPGKGLEWIGEIFHIGLKNYNPSLKSRVTISVDKSKNQFSLNLSSVTAADTAVYYCARVSFGDSYYFDYWGQGTLVTVSS

SEQ ID NO: 2284 - protein, 120 aa, synthetic construct
  source 1..120: note = XPL2-16G11[PD-L2]_H1.15
QVQLVESGPGLVKPSGTLSLTCAVSGGSISSSYWWSWVRQPPGKGLEWIGEIFHIGLWNYNPSLKSRVTISVDKSKNQFSLNLSSVTAADTAVYYCARVSFGDSYYVDYWGQGTLVTVSS

SEQ ID NO: 2285 - protein, 120 aa, synthetic construct
  source 1..120: note = XPL2-16G11[PD-L2]_H1.16
QVQLVESGPGLVKPSGTLSLTCAVSGGNIGSSNWWSWVRQPPGKGLEWIGEIFHIGLFNYNPSLKSRVTISVDKSKNQFSLNLSSVTAADTAVYYCARVSFGDSYYFDSWGQGTLVTVSS

SEQ ID NO: 2286 - protein, 120 aa, synthetic construct
  source 1..120: note = XPL2-16G11[PD-L2]_H1.17
QVQLVESGPGLVKPSGTLSLTCAVSGGSISSSNWWSWVRQPPGKGLEWIGEIFPIGFTNYNPSLKSRVTISVDKSKNQFSLNLSSVTAADTAVYYCARVSFGRSYYFDYWGQGTLVTVSS

SEQ ID NO: 2287 - protein, 120 aa, synthetic construct
  source 1..120: note = XPL2-16G11[PD-L2]_H1.18
QVQLVESGPGLVKPSGTLSLTCAVSGGSISSSNWWSWVRQPPGKGLEWIGEIFHIGVSNYNPSLKSRVTISVDKSKNQFSLNLSSVTAADTAVYYCARVSFGDSYYFDYWGQGTLVTVSS

SEQ ID NO: 2288 - protein, 120 aa, synthetic construct
  source 1..120: note = XPL2-16G11[PD-L2]_H1.19
QVQLVESGPGLVKPSGTLSLTCAVSGGSISASYWWSWVRQPPGKGLEWIGEIFHIGLVNYNPSLKSRVTISVDKSKNQFSLNLSSVTAADTAVYYCARVSFGDSYYFDSWGQGTLVTVSS

SEQ ID NO: 2289 - protein, 120 aa, synthetic construct
  source 1..120: note = XPL2-16G11[PD-L2]_H3.7
QVQLQESGPGLVKPSGTLSLTCAVSGGSISSSNWWGWVRQPPGKGLEWIGEIFHIGLTNYNPSLKSRVTISVDKSKNQFSLKLSSVTAADTAVYYCARVSFGDSYYFDYWGQGTLVTVSS

SEQ ID NO: 2290 - protein, 30 aa, synthetic construct
  source 1..30: note = 16G11 VH HFR1
  VARIANT 5: note = V or Q
  VARIANT 9: note = P or S
  VARIANT 15: note = S or P
  VARIANT 27: note = G, D, A, I or T
  VARIANT 28: note = S, A or N
  VARIANT 29: note = L or I
  VARIANT 30: note = S, L or G
QVQLXESGXGLVKPXGTLSLTCAVSGXXXX

SEQ ID NO: 2291 - protein, 14 aa, synthetic construct
  source 1..14: note = 16G11 VH HFR2
WVRQPPGKGLEWIG

SEQ ID NO: 2292 - protein, 16 aa, synthetic construct
  source 1..16: note = 16G11 VH HCDR2
  VARIANT 4: note = H, A, P or G
  VARIANT 7: note = V, L, S, I or F
  VARIANT 8: note = M, V, T, K, W, F or S
EIFXIGXXNYNPSLKS

SEQ ID NO: 2293 - protein, 32 aa, synthetic construct
  source 1..32: note = 16G11 VH HFR3
  VARIANT 16: note = N or K
RVTISVDKSKNQFSLXLSSVTAADTAVYYCAR

SEQ ID NO: 2294 - protein, 11 aa, synthetic construct
  source 1..11: note = 16G11 VH HCDR3
  VARIANT 5: note = D, V, L or R
  VARIANT 9: note = F, L, T or V
  VARIANT 11: note = Y or S
VSFGXSYYXDX

SEQ ID NO: 2295 - protein, 11 aa, synthetic construct
  source 1..11: note = 16G11 VH HFR4
WGQGTLVTVSS

SEQ ID NO: 2296 - protein, 122 aa, synthetic construct
  source 1..122: note = 1A1-C2 Variable heavy (vh) domain
QVQLQESGPGLVKPSGTLSLTCAVSGGSIGSSYWWTWIRQSPGKGLEWIGEIFHSGPTNYTPSLKSRVTISVDKSKNQFSLQLRSVTAADTAVYYCARTTGTTGFYYGMDVWGQGTTVTVSS

SEQ ID NO: 2297 - protein, 6 aa, synthetic construct
  source 1..6: note = 1A1-C2 vhCDR1
SSYWWT

SEQ ID NO: 2298 - protein, 16 aa, synthetic construct
  source 1..16: note = 1A1-C2 vhCDR2
EIFHSGPTNYTPSLKS

SEQ ID NO: 2299 - protein, 13 aa, synthetic construct
  source 1..13: note = 1A1-C2 vhCDR3
TTGTTGFYYGMDV

SEQ ID NO: 2300 - protein, 107 aa, synthetic construct
  source 1..107: note = 1A1-C2 Variable light (vl) domain
EVVLTQSPATLYVTPGERVTLSCRASQSVSSNLAWYQQKPGQAPRLLIYGASTRATGIPARFSGSGSGTEFTLTISSLQSEDFAVYYCQQFNNWPRTFGLGTKVEIT

SEQ ID NO: 2301 - protein, 11 aa, synthetic construct
  source 1..11: note = 1A1-C2 vlCDR1
RASQSVSSNLA

SEQ ID NO: 2302 - protein, 7 aa, synthetic construct
  source 1..7: note = 1A1-C2 vlCDR2
GASTRAT

SEQ ID NO: 2303 - protein, 9 aa, synthetic construct
  source 1..9: note = 1A1-C2 vlCDR3
QQFNNWPRT

SEQ ID NO: 2304 - protein, 121 aa, synthetic construct
  source 1..121: note = 2C4-E4 Variable heavy (vh) domain
QVQLVQSGAEVKKPGASVKVSCKASGYTFTGYVMHWVRQAPGQRLEWMGWINADNGITKYSQKFQGRVTITRDTSASTAYMELTNLRSEDTAVYYCARATRGFGEFYFDYWGQGNLVTVSS

SEQ ID NO: 2305 - protein, 5 aa, synthetic construct
  source 1..5: note = 2C4-E4 vhCDR1
GYVMH

SEQ ID NO: 2306 - protein, 17 aa, synthetic construct
  source 1..17: note = 2C4-E4 vhCDR2
WINADNGITKYSQKFQG

SEQ ID NO: 2307 - protein, 12 aa, synthetic construct
  source 1..12: note = 2C4-E4 vhCDR3
ATRGFGEFYFDY

SEQ ID NO: 2308 - protein, 106 aa, synthetic construct
  source 1..106: note = 2C4-E4 Variable light (vl) domain
DIQMTQSPSTLSASVGDRVTITCRASQTISSWLAWYQQKPGKAPNLLIYKASSLESGVPSRFSGSGSGTEFTLTISSLQPDDFATYYCQQYYSYWTFGQGTKVEIK

SEQ ID NO: 2309 - protein, 11 aa, synthetic construct
  source 1..11: note = 2C4-E4 vlCDR1
RASQTISSWLA

SEQ ID NO: 2310 - protein, 7 aa, synthetic construct
  source 1..7: note = 2C4-E4 vlCDR2
KASSLES

SEQ ID NO: 2311 - protein, 8 aa, synthetic construct
  source 1..8: note = 2C4-E4 vlCDR3
QQYYSYWT

SEQ ID NO: 2312 - protein, 125 aa, synthetic construct
  source 1..125: note = 8B5-B1 Variable heavy (vh) domain
EVQLLESGGGLVQPGGSLKLSCAASGFTFSSYAMFWVRQAPGEGLAWVSAITGSGDHTYYADSVKDHFTISRDNSKNTLYLQMNSLKAEDTAVYYCAKDASGNSYGFPYWYFDLWGRGTLVTVSS

SEQ ID NO: 2313 - protein, 5 aa, synthetic construct
  source 1..5: note = 8B5-B1 vhCDR1
SYAMF

SEQ ID NO: 2314 - protein, 17 aa, synthetic construct
  source 1..17: note = 8B5-B1 vhCDR2
AITGSGDHTYYADSVKD

SEQ ID NO: 2315 - protein, 16 aa, synthetic construct
  source 1..16: note = 8B5-B1 vhCDR3
DASGNSYGFPYWYFDL

SEQ ID NO: 2316 - protein, 111 aa, synthetic construct
  source 1..111: note = 8B5-B1 Variable light (vl) domain
QSALTQPASVSGSPGQSITISCTGTSSDVAGYNFVSWYQHHPGKTPKLMIYDVTNRPSGVSTRFSGSKSGNTASLTISGLQAEDEADYYCSSFTSATTLVFGGGTKLTVLG

SEQ ID NO: 2317 - protein, 14 aa, synthetic construct
  source 1..14: note = 8B5-B1 vlCDR1
TGTSSDVAGYNFVS

SEQ ID NO: 2318 - protein, 7 aa, synthetic construct
  source 1..7: note = 8B5-B1 vlCDR2
DVTNRPS

SEQ ID NO: 2319 - protein, 10 aa, synthetic construct
  source 1..10: note = 8B5-B1 vlCDR3
SSFTSATTLV

SEQ ID NO: 2320 - protein, 123 aa, synthetic construct
  source 1..123: note = 11C11-H5 Variable heavy (vh) domain
QVQLVESGGGVVQPGRSLRLSCAASGFAFSAYGMHWVRQAPGKGLEWVAISWYDGSNNYHADSVKGRFTISRDSSKNTLYLQMNSLRAEDTAVYYCAKSIGVARHYYYGMDVWGQGTTVTVSS

SEQ ID NO: 2321 - protein, 5 aa, synthetic construct
  source 1..5: note = 11C11-H5 vhCDR1
AYGMH

SEQ ID NO: 2322 - protein, 17 aa, synthetic construct
  source 1..17: note = 11C11-H5 vhCDR2
ISWYDGSNNYHADSVKG

SEQ ID NO: 2323 - protein, 14 aa, synthetic construct
  source 1..14: note = 11C11-H5 vhCDR3
SIGVARHYYYGMDV

SEQ ID NO: 2324 - protein, 107 aa, synthetic construct
  source 1..107: note = 11C11-H5 Variable light (vl) domain
SYELTQPPSVSVSPGQTASITCSGEELGDKYACWYQQKPGQSPVLVIYQDSKRPSGIPERFSGSNSGNAATLTISGTQAMDEADYYCQAWDSITVVFGGGTKLTVLG

SEQ ID NO: 2325 - protein, 11 aa, synthetic construct
  source 1..11: note = 11C11-H5 vlCDR1
SGEELGDKYAC

SEQ ID NO: 2326 - protein, 7 aa, synthetic construct
  source 1..7: note = 11C11-H5 vlCDR2
QDSKRPS

SEQ ID NO: 2327 - protein, 9 aa, synthetic construct
  source 1..9: note = 11C11-H5 vlCDR3
QAWDSITVV

SEQ ID NO: 2328 - protein, 123 aa, synthetic construct; identical to SEQ ID NO: 2320
  source 1..123: note = 19C3-B3 Variable heavy (vh) domain

SEQ ID NO: 2329 - protein, 5 aa, synthetic construct
  source 1..5: note = 19C3-B3 vhCDR1
AYGMH

SEQ ID NO: 2330 - protein, 17 aa, synthetic construct
  source 1..17: note = 19C3-B3 vhCDR2
ISWYDGSNNYHADSVKG

SEQ ID NO: 2331 - protein, 14 aa, synthetic construct
  source 1..14: note = 19C3-B3 vhCDR3
SIGVARHYYYGMDV

SEQ ID NO: 2332 - protein, 107 aa, synthetic construct
  source 1..107: note = 19C3-B3 Variable light (vl) domain
SYELTQPPSVSVSPGQTASITCSGEELGDKYACWYQQKPGQSPLLVIYQDSKRPSGIPERFSGSNSGNAATLTISGTQAMDEADYYCQAWDSITVIFGGGTKLTVLG

SEQ ID NO: 2333 - protein, 11 aa, synthetic construct
  source 1..11: note = 19C3-B3 vlCDR1
SGEELGDKYAC

SEQ ID NO: 2334 - protein, 7 aa, synthetic construct
  source 1..7: note = 19C3-B3 vlCDR2
QDSKRPS

SEQ ID NO: 2335 - protein, 9 aa, synthetic construct
  source 1..9: note = 19C3-B3 vlCDR3
QAWDSITVI

SEQ ID NO: 2336 - protein, 122 aa, synthetic construct
  source 1..122: note = 10D1-G1 Variable heavy (vh) domain
QVQLQESGPGLVKPSGTLSLTCAVSGGSISSSYWWSWVRQPPGKGLEWIGEIFHIGSTNYNPSLRSRVTISVVKSKNQFSLNLNSVTAADTAVYFCARVSGGYGYFSGMDVWGQGTTVTVSS

SEQ ID NO: 2337 - protein, 6 aa, synthetic construct
  source 1..6: note = 10D1-G1 vhCDR1
SSYWWS

SEQ ID NO: 2338 - protein, 16 aa, synthetic construct
  source 1..16: note = 10D1-G1 vhCDR2
EIFHIGSTNYNPSLRS

SEQ ID NO: 2339 - protein, 13 aa, synthetic construct
  source 1..13: note = 10D1-G1 vhCDR3
VSGGYGYFSGMDV

SEQ ID NO: 2340 - protein, 107 aa, synthetic construct
  source 1..107: note = 10D1-G1 Variable light (vl) domain
DIQMTQSPSSLSASVGDRVTITCRASQGIRNDLGWYQQKPGKAPKRLIYGASSLQSGVPSRFSGSGSGTEFTLTISSLQPEDFATYYCLQHNSYPRTFGQGTKVEIK

SEQ ID NO: 2341 - protein, 11 aa, synthetic construct
  source 1..11: note = 10D1-G1 vlCDR1
RASQGIRNDLG

SEQ ID NO: 2342 - protein, 7 aa, synthetic construct
  source 1..7: note = 10D1-G1 vlCDR2
GASSLQS

SEQ ID NO: 2343 - protein, 9 aa, synthetic construct
  source 1..9: note = 10D1-G1 vlCDR3
LQHNSYPRT

SEQ ID NO: 2344 - protein, 118 aa, synthetic construct
  source 1..118: note = 7H5-C5 Variable heavy (vh) domain
QVQLVESGGGLVKPGGSLRLSCAASGFSLSDYYMSWTRQAPGRGLEWVSFISSSGSTIYYVDSVKGRFTISRDHAKNSLYLQINSLRAEDTAVYYCARAQWLPDFDYWGQGTLVTVSS

SEQ ID NO: 2345 - protein, 5 aa, synthetic construct
  source 1..5: note = 7H5-C5 vhCDR1
DYYMS

SEQ ID NO: 2346 - protein, 17 aa, synthetic construct
  source 1..17: note = 7H5-C5 vhCDR2
FISSSGSTIYYVDSVKG

SEQ ID NO: 2347 - protein, 9 aa, synthetic construct
  source 1..9: note = 7H5-C5 vhCDR3
AQWLPDFDY

SEQ ID NO: 2348 - protein, 111 aa, synthetic construct
  source 1..111: note = 7H5-C5 Variable light (vl) domain
QSALTQPPSASGSPGQSVTISCTGTSSDVSGYNYVSWYQHHPDKAPKLLIYEVNKRPSGVPARFSGSKSGNTASLTVSGLQAEDEADYYCTSFADNNNVVFGGGTKLTVLG

SEQ ID NO: 2349 - protein, 14 aa, synthetic construct
  source 1..14: note = 7H5-C5 vlCDR1
TGTSSDVSGYNYVS

SEQ ID NO: 2350 - protein, 7 aa, synthetic construct
  source 1..7: note = 7H5-C5 vlCDR2
EVNKRPS

SEQ ID NO: 2351 - protein, 10 aa, synthetic construct
  source 1..10: note = 7H5-C5 vlCDR3
TSFADNNNVV

SEQ ID NO: 2352 - protein, 118 aa, synthetic construct
  source 1..118: note = 9AC-C7 Variable heavy (vh) domain
QVQLVESGGGLVKPGGSLRLSCAASGFSLSDYYMSWIRQAPGRGLEWVSYISSSGSTIYYVDSVKGRFTISRDNAKNSLYLQINSLRAEDTAVYHCARAQWLPDFDYWGQGTLVTVSS

SEQ ID NO: 2353 - protein, 5 aa, synthetic construct
  source 1..5: note = 9AC-C7 vhCDR1
DYYMS

SEQ ID NO: 2354 - protein, 17 aa, synthetic construct
  source 1..17: note = 9AC-C7 vhCDR2
YISSSGSTIYYVDSVKG

SEQ ID NO: 2355 - protein, 9 aa, synthetic construct
  source 1..9: note = 9AC-C7 vhCDR3
AQWLPDFDY

SEQ ID NO: 2356 - protein, 111 aa, synthetic construct
  source 1..111: note = 9AC-C7 Variable light (vl) domain
QSALTQPPSASGSPGQSVTISCTGTSSDVGGYNYVSWYQHHPGKVPKLMIYEVSKRPSGVPDRFSGSKSGNTASLTVSGLQAEDEADYYCTSFADNNNVGFGGGTKLTVLG

SEQ ID NO: 2357 - protein, 14 aa, synthetic construct
  source 1..14: note = 9AC-C7 vlCDR1
TGTSSDVGGYNYVS

SEQ ID NO: 2358 - protein, 7 aa, synthetic construct
  source 1..7: note = 9AC-C7 vlCDR2
EVSKRPS

SEQ ID NO: 2359 - protein, 10 aa, synthetic construct
  source 1..10: note = 9AC-C7 vlCDR3
TSFADNNNVG

SEQ ID NO: 2360 - protein, 122 aa, synthetic construct
  source 1..122: note = 10A9-D2 Variable heavy (vh) domain
QVQLQESGPGLVKPSETLSLTCAVSGGSISSSYWWSWVRQPPGKGLEWVGEVFHVGVTNYNPSLKSRVTISVDKSKNQFSLKLTSVTAADTAVYYCARVTGTTGYYHGLDVWGQGTTVTVFS

SEQ ID NO: 2361 - protein, 6 aa, synthetic construct
  source 1..6: note = 10A9-D2 vhCDR1
SSYWWS

SEQ ID NO: 2362 - protein, 16 aa, synthetic construct
  source 1..16: note = 10A9-D2 vhCDR2
EVFHVGVTNYNPSLKS

SEQ ID NO: 2363 - protein, 13 aa, synthetic construct
  source 1..13: note = 10A9-D2 vhCDR3
VTGTTGYYHGLDV

SEQ ID NO: 2364 - protein, 107 aa, synthetic construct
  source 1..107: note = 10A9-D2 Variable light (vl) domain
DIQMTQSPSSLSASVGDRVTITCRASQGIRNDLGWYQQKPGKVPKRLIYAASSLQSGIPSRFSGSGSGTEFTLTISSLQPEDFATYYCLQHNNYPRTFGQGTKVEIK

SEQ ID NO: 2365 - protein, 11 aa, synthetic construct
  source 1..11: note = 10A9-D2 vlCDR1
RASQGIRNDLG

SEQ ID NO: 2366 - protein, 7 aa, synthetic construct
  source 1..7: note = 10A9-D2 vlCDR2
AASSLQS

SEQ ID NO: 2367 - protein, 9 aa, synthetic construct
  source 1..9: note = 10A9-D2 vlCDR3
LQHNNYPRT

SEQ ID NO: 2368 - protein, 118 aa, synthetic construct
  source 1..118: note = 19B3-B3 Variable heavy (vh) domain
QVQLVQSGAEVKKPGASVKVSCMASGYTFTNYAIHWVRQAPGQRLEWMGWINTGLGKPKYSQMFQDRVTITRDTSASTASMELSGLRSDDTAVYYCARVGWELYFDYWGQGTLVTVSS

SEQ ID NO: 2369 - protein, 5 aa, synthetic construct
  source 1..5: note = 19B3-B3 vhCDR1
NYAIH

SEQ ID NO: 2370 - protein, 17 aa, synthetic construct
  source 1..17: note = 19B3-B3 vhCDR2
WINTGLGKPKYSQMFQD

SEQ ID NO: 2371 - protein, 9 aa, synthetic construct
  source 1..9: note = 19B3-B3 vhCDR3
VGWELYFDY

SEQ ID NO: 2372 - protein, 106 aa, synthetic construct
  source 1..106: note = 19B3-B3 Variable light (vl) domain
DIQMTQSPSTLSASVGDRVTITCRASQSISSLLAWYQQKPGKAPKLLIYKASSLESGVPSRFSGSGSGTEFTLTISSLQPDDFATYFCQQYNSYWTFGQGTKVEIK

SEQ ID NO: 2373 - protein, 11 aa, synthetic construct
  source 1..11: note = 19B3-B3 vlCDR1
RASQSISSLLA

SEQ ID NO: 2374 - protein, 7 aa, synthetic construct
  source 1..7: note = 19B3-B3 vlCDR2
KASSLES

SEQ ID NO: 2375 - protein, 8 aa, synthetic construct
  source 1..8: note = 19B3-B3 vlCDR3
QQYNSYWT

SEQ ID NO: 2376 - protein, 122 aa, synthetic construct
  source 1..122: note = 12A1-D4 Variable heavy (vh) domain
QVQLQESGPGLVKPSGTLSLTCAVSGGSISSNNWWSWVRQPPGKGLEWIGEIFHVGSTNYNPSLKSRVTISVDKSKNQFSLKLSSLTAADTAVYYCARMVGATGHYYGMDVWGQGTTVTVSS

SEQ ID NO: 2377 - protein, 6 aa, synthetic construct
  source 1..6: note = 12A1-D4 vhCDR1
SNNWWS

SEQ ID NO: 2378 - protein, 16 aa, synthetic construct
  source 1..16: note = 12A1-D4 vhCDR2
EIFHVGSTNYNPSLKS

SEQ ID NO: 2379 - protein, 13 aa, synthetic construct
  source 1..13: note = 12A1-D4 vhCDR3
MVGATGHYYGMDV

SEQ ID NO: 2380 - protein, 109 aa, synthetic construct
  source 1..109: note = 12A1-D4 Variable light (vl) domain
DIQLTQSPSFLSASVGDRVTITCRASQGISSSLAWYQQKPGKAPKFLIYAASTLQSGVPSRFSGSGSGTEFTLTISSLQPEDFATYYCQQLNSYPKSWTFGQGTKVEIK

SEQ ID NO: 2381 - protein, 11 aa, synthetic construct
  source 1..11: note = 12A1-D4 vlCDR1
RASQGISSSLA

SEQ ID NO: 2382 - protein, 7 aa, synthetic construct
  source 1..7: note = 12A1-D4 vlCDR2
AASTLQS

SEQ ID NO: 2383 - protein, 11 aa, synthetic construct
  source 1..11: note = 12A1-D4 vlCDR3
QQLNSYPKSWT

SEQ ID NO: 2384 - protein, 122 aa, synthetic construct; identical to SEQ ID NO: 2336
  source 1..122: note = 10D1-G1(N31Q.N92Q.LC) Variable heavy (vh) domain

SEQ ID NO: 2385 - protein, 6 aa, synthetic construct
  source 1..6: note = 10D1-G1(N31Q.N92Q.LC) vhCDR1
SSYWWS

SEQ ID NO: 2386 - protein, 16 aa, synthetic construct
  source 1..16: note = 10D1-G1(N31Q.N92Q.LC) vhCDR2
EIFHIGSTNYNPSLRS

SEQ ID NO: 2387 - protein, 13 aa, synthetic construct
  source 1..13: note = 10D1-G1(N31Q.N92Q.LC) vhCDR3
VSGGYGYFSGMDV

SEQ ID NO: 2388 - protein, 107 aa, synthetic construct
  source 1..107: note = 10D1-G1(N31Q.N92Q.LC) Variable light (vl) domain
DIQMTQSPSSLSASVGDRVTITCRASQGIRQDLGWYQQKPGKAPKRLIYGASSLQSGVPSRFSGSGSGTEFTLTISSLQPEDFATYYCLQHQSYPRTFGQGTKVEIK

SEQ ID NO: 2389 - protein, 11 aa, synthetic construct
  source 1..11: note = 10D1-G1(N31Q.N92Q.LC) vlCDR1
RASQGIRQDLG

SEQ ID NO: 2390 - protein, 7 aa, synthetic construct
  source 1..7: note = 10D1-G1(N31Q.N92Q.LC) vlCDR2
GASSLQS

SEQ ID NO: 2391 - protein, 9 aa, synthetic construct
  source 1..9: note = 10D1-G1(N31Q.N92Q.LC) vlCDR3
LQHQSYPRT

SEQ ID NO: 2392 - protein, 122 aa, synthetic construct; identical to SEQ ID NO: 2360
  source 1..122: note = 10A9-D2(N31Q.LC) Variable heavy (vh) domain

SEQ ID NO: 2393 - protein, 6 aa, synthetic construct
  source 1..6: note = 10A9-D2(N31Q.LC) vhCDR1
SSYWWS

SEQ ID NO: 2394 - protein, 16 aa, synthetic construct
  source 1..16: note = 10A9-D2(N31Q.LC) vhCDR2
EVFHVGVTNYNPSLKS

SEQ ID NO: 2395 - protein, 13 aa, synthetic construct
  source 1..13: note = 10A9-D2(N31Q.LC) vhCDR3
VTGTTGYYHGLDV

SEQ ID NO: 2396 - protein, 107 aa, synthetic construct
  source 1..107: note = 10A9-D2(N31Q.LC) Variable light (vl) domain
DIQMTQSPSSLSASVGDRVTITCRASQGIRQDLGWYQQKPGKVPKRLIYAASSLQSGIPSRFSGSGSGTEFTLTISSLQPEDFATYYCLQHNNYPRTFGQGTKVEIK

SEQ ID NO: 2397 - protein, 11 aa, synthetic construct
  source 1..11: note = 10A9-D2(N31Q.LC) vlCDR1
RASQGIRQDLG

SEQ ID NO: 2398 - protein, 7 aa, synthetic construct
  source 1..7: note = 10A9-D2(N31Q.LC) vlCDR2
AASSLQS

SEQ ID NO: 2399 - protein, 9 aa, synthetic construct
  source 1..9: note = 10A9-D2(N31Q.LC) vlCDR3
LQHNNYPRT

SEQ ID NO: 2400 - protein, 118 aa, synthetic construct
  source 1..118: note = 19B3-B3(M23K.M63L.HC) Variable heavy (vh) domain
QVQLVQSGAEVKKPGASVKVSCKASGYTFTNYAIHWVRQAPGQRLEWMGWINTGLGKPKYSQLFQDRVTITRDTSASTASMELSGLRSDDTAVYYCARVGWELYFDYWGQGTLVTVSS

SEQ ID NO: 2401 - protein, 5 aa, synthetic construct
  source 1..5: note = 19B3-B3(M23K.M63L.HC) vhCDR1
NYAIH

SEQ ID NO: 2402 - protein, 17 aa, synthetic construct
  source 1..17: note = 19B3-B3(M23K.M63L.HC) vhCDR2
WINTGLGKPKYSQLFQD

SEQ ID NO: 2403 - protein, 9 aa, synthetic construct
  source 1..9: note = 19B3-B3(M23K.M63L.HC) vhCDR3
VGWELYFDY

SEQ ID NO: 2404 - protein, 106 aa, synthetic construct; identical to SEQ ID NO: 2372
  source 1..106: note = 19B3-B3(M23K.M63L.HC) Variable light (vl) domain

SEQ ID NO: 2405 - protein, 11 aa, synthetic construct
  source 1..11: note = 19B3-B3(M23K.M63L.HC) vlCDR1
RASQSISSLLA

SEQ ID NO: 2406 - protein, 7 aa, synthetic construct
  source 1..7: note = 19B3-B3(M23K.M63L.HC) vlCDR2
KASSLES

SEQ ID NO: 2407 - protein, 8 aa, synthetic construct
  source 1..8: note = 19B3-B3(M23K.M63L.HC) vlCDR3
QQYNSYWT

SEQ ID NO: 2408 - protein, 118 aa, synthetic construct; identical to SEQ ID NO: 2400
  source 1..118: note = 2-19H2 Variable heavy (vh) domain

SEQ ID NO: 2409 - protein, 5 aa, synthetic construct
  source 1..5: note = 2-19H2 vhCDR1
NYAIH

SEQ ID NO: 2410 - protein, 17 aa, synthetic construct
  source 1..17: note = 2-19H2 vhCDR2
WINTGLGKPKYSQLFQD

SEQ ID NO: 2411 - protein, 9 aa, synthetic construct
  source 1..9: note = 2-19H2 vhCDR3
VGWELYFDY

SEQ ID NO: 2412 - protein, 106 aa, synthetic construct; identical to SEQ ID NO: 2308
  source 1..106: note = 2-19H2 Variable light (vl) domain

SEQ ID NO: 2413 - protein, 11 aa, synthetic construct
  source 1..11: note = 2-19H2 vlCDR1
RASQTISSWLA

SEQ ID NO: 2414 - protein, 7 aa, synthetic construct
  source 1..7: note = 2-19H2 vlCDR2
KASSLES

SEQ ID NO: 2415 - protein, 8 aa, synthetic construct
  source 1..8: note = 2-19H2 vlCDR3
QQYYSYWT

SEQ ID NO: 2416 - protein, 118 aa, synthetic construct; identical to SEQ ID NO: 2400
  source 1..118: note = 19B3-B3(N92Q.LC.M23K.M63L.HC) Variable heavy (vh) domain

SEQ ID NO: 2417 - protein, 5 aa, synthetic construct
  source 1..5: note = 19B3-B3(N92Q.LC.M23K.M63L.HC) vhCDR1
NYAIH

SEQ ID NO: 2418 - protein, 17 aa, synthetic construct
  source 1..17: note = 19B3-B3(N92Q.LC.M23K.M63L.HC) vhCDR2
WINTGLGKPKYSQLFQD

SEQ ID NO: 2419 - protein, 9 aa, synthetic construct
  source 1..9: note = 19B3-B3(N92Q.LC.M23K.M63L.HC) vhCDR3
VGWELYFDY

SEQ ID NO: 2420 - protein, 106 aa, synthetic construct
  source 1..106: note = 19B3-B3(N92Q.LC.M23K.M63L.HC) Variable light (vl) domain
DIQMTQSPSTLSASVGDRVTITCRASQSISSLLAWYQQKPGKAPKLLIYKASSLESGVPSRFSGSGSGTEFTLTISSLQPDDFATYFCQQYQSYWTFGQGTKVEIK

SEQ ID NO: 2421 - protein, 11 aa, synthetic construct
  source 1..11: note = 19B3-B3(N92Q.LC.M23K.M63L.HC) vlCDR1
RASQSISSLLA

SEQ ID NO: 2422 - protein, 7 aa, synthetic construct
  source 1..7: note = 19B3-B3(N92Q.LC.M23K.M63L.HC) vlCDR2
KASSLES

SEQ ID NO: 2423 - protein, 8 aa, synthetic construct
  source 1..8: note = 19B3-B3(N92Q.LC.M23K.M63L.HC) vlCDR3
QQYQSYWT

SEQ ID NO: 2424 - protein, 118 aa, synthetic construct; identical to SEQ ID NO: 2400
  source 1..118: note = 19B3-B3(N92Y.LC.M23K.M63L.HC) Variable heavy (vh) domain

SEQ ID NO: 2425 - protein, 5 aa, synthetic construct
  source 1..5: note = 19B3-B3(N92Y.LC.M23K.M63L.HC) vhCDR1
NYAIH

SEQ ID NO: 2426 - protein, 17 aa, synthetic construct
  source 1..17: note = 19B3-B3(N92Y.LC.M23K.M63L.HC) vhCDR2
WINTGLGKPKYSQLFQD

SEQ ID NO: 2427 - protein, 9 aa, synthetic construct
  source 1..9: note = 19B3-B3(N92Y.LC.M23K.M63L.HC) vhCDR3
VGWELYFDY

SEQ ID NO: 2428 - protein, 106 aa, synthetic construct
  source 1..106: note = 19B3-B3(N92Y.LC.M23K.M63L.HC) Variable light (vl) domain
DIQMTQSPSTLSASVGDRVTITCRASQSISSLLAWYQQKPGKAPKLLIYKASSLESGVPSRFSGSGSGTEFTLTISSLQPDDFATYFCQQYYSYWTFGQGTKVEIK

SEQ ID NO: 2429 - protein, 11 aa, synthetic construct
  source 1..11: note = 19B3-B3(N92Y.LC.M23K.M63L.HC) vlCDR1
RASQSISSLLA

SEQ ID NO: 2430 - protein, 7 aa, synthetic construct
  source 1..7: note = 19B3-B3(N92Y.LC.M23K.M63L.HC) vlCDR2
KASSLES

SEQ ID NO: 2431 - protein, 8 aa, synthetic construct
  source 1..8: note = 19B3-B3(N92Y.LC.M23K.M63L.HC) vlCDR3
QQYYSYWT

SEQ ID NO: 2432 - protein, 136 aa, synthetic construct
  source 1..136: note = 3G2 Variable heavy (vh) domain
MNFGLSLIFLALILKGVQCEVQLVESGGDLVKSGGSLKLSCAASGFIFSSFGMSWVRQTPDKRLEWVATISSGGRNIYYLDSVKGRFTISRDNVKNILYLQMSGLKSEDSAMYYCAREGHYALDYCGQGTSVTVSS

SEQ ID NO: 2433 - protein, 5 aa, synthetic construct
  source 1..5: note = 3G2 vhCDR1
SFGMS

SEQ ID NO: 2434 - protein, 17 aa, synthetic construct
  source 1..17: note = 3G2 vhCDR2
TISSGGRNIYYLDSVKG

SEQ ID NO: 2435 - protein, 8 aa, synthetic construct
  source 1..8: note = 3G2 vhCDR3
EGHYALDY

SEQ ID NO: 2436 - protein, 113 aa, synthetic construct
  source 1..113: note = 3G2 Variable light (vl) domain
DIVMTQSPSSLATSVGQRVTMSCKSSQNLLYSTDQKNYLAWFQQKPGQSPKLLLYFASIRESGVPDRFIGSGSGTDFTLTISSVQAEDLADYFCQQHYNTPPTFGGGTRLEIK

SEQ ID NO: 2437 - protein, 17 aa, synthetic construct
  source 1..17: note = 3G2 vlCDR1
KSSQNLLYSTDQKNYLA

SEQ ID NO: 2438 - protein, 7 aa, synthetic construct
  source 1..7: note = 3G2 vlCDR2
FASIRES

SEQ ID NO: 2439 - protein, 9 aa, synthetic construct
  source 1..9: note = 3G2 vlCDR3
QQHYNTPPT

SEQ ID NO: 2440 - protein, 114 aa, synthetic construct
  source 1..114: note = 24F.10C12 Variable heavy (vh) domain
QVQLQQSAAELARPGASVKMSCKASGYTFTGYTMHWVKQRPGQGLEWIGYINPRSGYTEYNQKFKDKTTLTADKSSSTAYMQLSSLTSEDSAVYYCARPWFAYWGQGTLVTVSA

SEQ ID NO: 2441 - protein, 5 aa, synthetic construct
  source 1..5: note = 24F.10C12 vhCDR1
GYTMH

SEQ ID NO: 2442 - protein, 17 aa, synthetic construct
  source 1..17: note = 24F.10C12 vhCDR2
YINPRSGYTEYNQKFKD

SEQ ID NO: 2443 - protein, 5 aa, synthetic construct
  source 1..5: note = 24F.10C12 vhCDR3
PWFAY

SEQ ID NO: 2444 - protein, 113 aa, synthetic construct
  source 1..113: note = 24F.10C12 Variable light (vl) domain
DIVMTQSPSSLTVTAGEKVTMSCKSSQSLLNSGNQKNYLTWYQQKPGQPPKLLIYWASTRESGVPDRFTGSGSGTDFTLTISSVQAEDLAVYYCQNDYSYPLTFGAGTKLELK

SEQ ID NO: 2445 - protein, 17 aa, synthetic construct
  source 1..17: note = 24F.10C12 vlCDR1
KSSQSLLNSGNQKNYLT

SEQ ID NO: 2446 - protein, 7 aa, synthetic construct
  source 1..7: note = 24F.10C12 vlCDR2
WASTRES

SEQ ID NO: 2447 - protein, 9 aa, synthetic construct
  source 1..9: note = 24F.10C12 vlCDR3
QNDYSYPLT

SEQ ID NO: 2448 - protein, 121 aa, synthetic construct
  source 1..121: note = 1A7[CD28]_H1L1 Variable heavy (vh) domain
EVQLLESGGGLVQPGGSLRLSCAASGFTFSSYAMSWVRQAPGKGLEWVSTISGSGDSTYYADSVKGRFTISRDNSKNTLYLQMNSLRAEDTAVYYCAKSGPGLRQVGFDYWGQGTLVTVSS

SEQ ID NO: 2449 - protein, 5 aa, synthetic construct
  source 1..5: note = 1A7[CD28]_H1L1 vhCDR1
SYAMS

SEQ ID NO: 2450 - protein, 17 aa, synthetic construct
  source 1..17: note = 1A7[CD28]_H1L1 vhCDR2
TISGSGDSTYYADSVKG

SEQ ID NO: 2451 - protein, 12 aa, synthetic construct
  source 1..12: note = 1A7[CD28]_H1L1 vhCDR3
SGPGLRQVGFDY

SEQ ID NO: 2452 - protein, 107 aa, synthetic construct
  source 1..107: note = 1A7[CD28]_H1L1 Variable light (vl) domain
DIQMTQSPSSLSASVGDRVTITCRASQSISSYLNWYQQKPGKAPKLLIYAASSLQSGVPSRFSGSGSGTDFTLTISSLQPEDFATYYCQQSYSTPFTFGQGTKLEIK

SEQ ID NO: 2453 - protein, 11 aa, synthetic construct
  source 1..11: note = 1A7[CD28]_H1L1 vlCDR1
RASQSISSYLN

SEQ ID NO: 2454 - protein, 7 aa, synthetic construct
  source 1..7: note = 1A7[CD28]_H1L1 vlCDR2
AASSLQS

SEQ ID NO: 2455 - protein, 9 aa, synthetic construct
  source 1..9: note = 1A7[CD28]_H1L1 vlCDR3
QQSYSTPFT

SEQ ID NO: 2456 - protein, 121 aa, synthetic construct
  source 1..121: note = 1A7[CD28]_H1.1
EVQLLESGGGLVQPGGSLRLSCAASGFTFSSYYMSWVRQAPGKGLEWVSTISGSGDSTYYADSVKGRFTISRDNSKNTLYLQMNSLRAEDTAVYYCAKSGPGLRQVGFDYWGQGTLVTVSS

SEQ ID NO: 2457 - protein, 121 aa, synthetic construct
  source 1..121: note = 1A7[CD28]_H1.2
EVQLLESGGGLVQPGGSLRLSCAASGFTFSSYAMSWVRQAPGKGLEWVSTIDGSGDSTYYADSVKGRFTISRDNSKNTLYLQMNSLRAEDTAVYYCAKSGPGLRQVGFDYWGQGTLVTVSS

SEQ ID NO: 2458 - protein, 121 aa, synthetic construct
  source 1..121: note = 1A7[CD28]_H1.3
EVQLLESGGGLVQPGGSLRLSCAASGFTFSSYAMSWVRQAPGKGLEWVSTIEGSGDSTYYADSVKGRFTISRDNSKNTLYLQMNSLRAEDTAVYYCAKSGPGLRQVGFDYWGQGTLVTVSS

SEQ ID NO: 2459 - protein, 121 aa, synthetic construct
  source 1..121: note = 1A7[CD28]_H1.4
EVQLLESGGGLVQPGGSLRLSCAASGFTFSSYAMSWVRQAPGKGLEWVSTIYGSGDSTYYADSVKGRFTISRDNSKNTLYLQMNSLRAEDTAVYYCAKSGPGLRQVGFDYWGQGTLVTVSS

SEQ ID NO: 2460 - protein, 121 aa, synthetic construct
  source 1..121: note = 1A7[CD28]_H1.5
EVQLLESGGGLVQPGGSLRLSCAASGFTFSSYAMSWVRQAPGKGLEWVSTISDSGDSTYYADSVKGRFTISRDNSKNTLYLQMNSLRAEDTAVYYCAKSGPGLRQVGFDYWGQGTLVTVSS

SEQ ID NO: 2461 - protein, 121 aa, synthetic construct
  source 1..121: note = 1A7[CD28]_H1.6
EVQLLESGGGLVQPGGSLRLSCAASGFTFSSYAMSWVRQAPGKGLEWVSTISESGDSTYYADSVKGRFTISRDNSKNTLYLQMNSLRAEDTAVYYCAKSGPGLRQVGFDYWGQGTLVTVSS

SEQ ID NO: 2462 - protein, 121 aa, synthetic construct
  source 1..121: note = 1A7[CD28]_H1.7
EVQLLESGGGLVQPGGSLRLSCAASGFTFSSYAMSWVRQAPGKGLEWVSTISGSGTSTYYADSVKGRFTISRDNSKNTLYLQMNSLRAEDTAVYYCAKSGPGLRQVGFDYWGQGTLVTVSS

SEQ ID NO: 2463 - protein, 121 aa, synthetic construct
  source 1..121: note = 1A7[CD28]_H1.8
EVQLLESGGGLVQPGGSLRLSCAASGFTFSSYAMSWVRQAPGKGLEWVSTISGSGYSTYYADSVKGRFTISRDNSKNTLYLQMNSLRAEDTAVYYCAKSGPGLRQVGFDYWGQGTLVTVSS

SEQ ID NO: 2464 - protein, 121 aa, synthetic construct
  source 1..121: note = 1A7[CD28]_H1.9
EVQLLESGGGLVQPGGSLRLSCAASGFTFSSYAMSWVRQAPGKGLEWVSTISGSGDYTYYADSVKGRFTISRDNSKNTLYLQMNSLRAEDTAVYYCAKSGPGLRQVGFDYWGQGTLVTVSS

SEQ ID NO: 2465 - protein, 121 aa, synthetic construct
  source 1..121: note = 1A7[CD28]_H1.10
EVQLLESGGGLVQPGGSLRLSCAASGFTFSSYYMSWVRQAPGKGLEWVSTIDGSGDSTYYADSVKGRFTISRDNSKNTLYLQMNSLRAEDTAVYYCAKSGPGLRQVGFDYWGQGTLVTVSS

SEQ ID NO: 2466 - protein, 121 aa, synthetic construct
  source 1..121: note = 1A7[CD28]_H1.11
EVQLLESGGGLVQPGGSLRLSCAASGFTFSSYYMSWVRQAPGKGLEWVSTIEGSGDSTYYADSVKGRFTISRDNSKNTLYLQMNSLRAEDTAVYYCAKSGPGLRQVGFDYWGQGTLVTVSS

SEQ ID NO: 2467 - protein, 121 aa, synthetic construct
  source 1..121: note = 1A7[CD28]_H1.12
EVQLLESGGGLVQPGGSLRLSCAASGFTFSSYYMSWVRQAPGKGLEWVSTIYGSGDSTYYADSVKGRFTISRDNSKNTLYLQMNSLRAEDTAVYYCAKSGPGLRQVGFDYWGQGTLVTVSS

SEQ ID NO: 2468 - protein, 121 aa, synthetic construct
  source 1..121: note = 1A7[CD28]_H1.13
EVQLLESGGGLVQPGGSLRLSCAASGFTFSSYYMSWVRQAPGKGLEWVSTISDSGDSTYYADSVKGRFTISRDNSKNTLYLQMNSLRAEDTAVYYCAKSGPGLRQVGFDYWGQGTLVTVSS

SEQ ID NO: 2469 - protein, 121 aa, synthetic construct
  source 1..121: note = 1A7[CD28]_H1.14
EVQLLESGGGLVQPGGSLRLSCAASGFTFSSYYMSWVRQAPGKGLEWVSTISESGDSTYYADSVKGRFTISRDNSKNTLYLQMNSLRAEDTAVYYCAKSGPGLRQVGFDYWGQGTLVTVSS

SEQ ID NO: 2470 - protein, 121 aa, synthetic construct
  source 1..121: note = 1A7[CD28]_H1.15
EVQLLESGGGLVQPGGSLRLSCAASGFTFSSYYMSWVRQAPGKGLEWVSTISGSGTSTYYADSVKGRFTISRDNSKNTLYLQMNSLRAEDTAVYYCAKSGPGLRQVGFDYWGQGTLVTVSS

SEQ ID NO: 2471 - protein, 121 aa, synthetic construct
  source 1..121: note = 1A7[CD28]_H1.16
EVQLLESGGGLVQPGGSLRLSCAASGFTFSSYYMSWVRQAPGKGLEWVSTISGSGYSTYYADSVKGRFTISRDNSKNTLYLQMNSLRAEDTAVYYCAKSGPGLRQVGFDYWGQGTLVTVSS

SEQ ID NO: 2472 - protein, 121 aa, synthetic construct
  source 1..121: note = 1A7[CD28]_H1.17
EVQLLESGGGLVQPGGSLRLSCAASGFTFSSYYMSWVRQAPGKGLEWVSTISGSGDYTYYADSVKGRFTISRDNSKNTLYLQMNSLRAEDTAVYYCAKSGPGLRQVGFDYWGQGTLVTVSS

SEQ ID NO: 2473 - protein, 121 aa, synthetic construct
  source 1..121: note = 1A7[CD28]_H1.18
EVQLLESGGGLVQPGGSLRLSCAASGFTFSSYAMSWVRQAPGKGLEWVSTIDDSGDSTYYADSVKGRFTISRDNSKNTLYLQMNSLRAEDTAVYYCAKSGPGLRQVGFDYWGQGTLVTVSS

SEQ ID NO: 2474 - protein, 121 aa, synthetic construct
  source 1..121: note = 1A7[CD28]_H1.19
EVQLLESGGGLVQPGGSLRLSCAASGFTFSSYAMSWVRQAPGKGLEWVSTIDESGDSTYYADSVKGRFTISRDNSKNTLYLQMNSLRAEDTAVYYCAKSGPGLRQVGFDYWGQGTLVTVSS

SEQ ID NO: 2475 - protein, 121 aa, synthetic construct
  source 1..121: note = 1A7[CD28]_H1.20
EVQLLESGGGLVQPGGSLRLSCAASGFTFSSYAMSWVRQAPGKGLEWVSTIDGSGTSTYYADSVKGRFTISRDNSKNTLYLQMNSLRAEDTAVYYCAKSGPGLRQVGFDYWGQGTLVTVSS

SEQ ID NO: 2476 - protein, 121 aa, synthetic construct
  source 1..121: note = 1A7[CD28]_H1.21
EVQLLESGGGLVQPGGSLRLSCAASGFTFSSYAMSWVRQAPGKGLEWVSTIDGSGYSTYYADSVKGRFTISRDNSKNTLYLQMNSLRAEDTAVYYCAKSGPGLRQVGFDYWGQGTLVTVSS

SEQ ID NO: 2477 - protein, 121 aa, synthetic construct
  source 1..121: note = 1A7[CD28]_H1.22
EVQLLESGGGLVQPGGSLRLSCAASGFTFSSYAMSWVRQAPGKGLEWVSTIDGSGDYTYYADSVKGRFTISRDNSKNTLYLQMNSLRAEDTAVYYCAKSGPGLRQVGFDYWGQGTLVTVSS

SEQ ID NO: 2478 - protein, 121 aa, synthetic construct
  source 1..121: note = 1A7[CD28]_H1.23
EVQLLESGGGLVQPGGSLRLSCAASGFTFSSYAMSWVRQAPGKGLEWVSTIEDSGDSTYYADSVKGRFTISRDNSKNTLYLQMNSLRAEDTAVYYCAKSGPGLRQVGFDYWGQGTLVTVSS

SEQ ID NO: 2479 - protein, 121 aa, synthetic construct
  source 1..121: note = 1A7[CD28]_H1.24
EVQLLESGGGLVQPGGSLRLSCAASGFTFSSYAMSWVRQAPGKGLEWVSTIEESGDSTYYADSVKGRFTISRDNSKNTLYLQMNSLRAEDTAVYYCAKSGPGLRQVGFDYWGQGTLVTVSS

SEQ ID NO: 2480 - protein, 121 aa, synthetic construct
  source 1..121: note = 1A7[CD28]_H1.25
EVQLLESGGGLVQPGGSLRLSCAASGFTFSSYAMSWVRQAPGKGLEWVSTIEGSGTSTYYADSVKGRFTISRDNSKNTLYLQMNSLRAEDTAVYYCAKSGPGLRQVGFDYWGQGTLVTVSS

SEQ ID NO: 2481 - protein, 121 aa, synthetic construct
  source 1..121: note = 1A7[CD28]_H1.26
EVQLLESGGGLVQPGGSLRLSCAASGFTFSSYAMSWVRQAPGKGLEWVSTIEGSGYSTYYADSVKGRFTISRDNSKNTLYLQMNSLRAEDTAVYYCAKSGPGLRQVGFDYWGQGTLVTVSS

SEQ ID NO: 2482 - protein, 121 aa, synthetic construct
  source 1..121: note = 1A7[CD28]_H1.27
EVQLLESGGGLVQPGGSLRLSCAASGFTFSSYAMSWVRQAPGKGLEWVSTIEGSGDYTYYADSVKGRFTISRDNSKNTLYLQMNSLRAEDTAVYYCAKSGPGLRQVGFDYWGQGTLVTVSS

SEQ ID NO: 2483 - protein, 121 aa, synthetic construct
  source 1..121: note = 1A7[CD28]_H1.28
EVQLLESGGGLVQPGGSLRLSCAASGFTFSSYAMSWVRQAPGKGLEWVSTIYDSGDSTYYADSVKGRFTISRDNSKNTLYLQMNSLRAEDTAVYYCAKSGPGLRQVGFDYWGQGTLVTVSS

SEQ ID NO: 2484 - protein, 121 aa, synthetic construct
  source 1..121: note = 1A7[CD28]_H1.29
EVQLLESGGGLVQPGGSLRLSCAASGFTFSSYAMSWVRQAPGKGLEWVSTIYESGDSTYYADSVKGRFTISRDNSKNTLYLQMNSLRAEDTAVYYCAKSGPGLRQVGFDYWGQGTLVTVSS

SEQ ID NO: 2485 - protein, 121 aa, synthetic construct
  source 1..121: note = 1A7[CD28]_H1.30
EVQLLESGGGLVQPGGSLRLSCAASGFTFSSYAMSWVRQAPGKGLEWVSTIYGSGTSTYYADSVKGRFTISRDNSKNTLYLQMNSLRAEDTAVYYCAKSGPGLRQVGFDYWGQGTLVTVSS

SEQ ID NO: 2486 - protein, 121 aa, synthetic construct
  source 1..121: note = 1A7[CD28]_H1.31
EVQLLESGGGLVQPGGSLRLSCAASGFTFSSYAMSWVRQAPGKGLEWVSTIYGSGYSTYYADSVKGRFTISRDNSKNTLYLQMNSLRAEDTAVYYCAKSGPGLRQVGFDYWGQGTLVTVSS

SEQ ID NO: 2487 - protein, 121 aa, synthetic construct
  source 1..121: note = 1A7[CD28]_H1.32
EVQLLESGGGLVQPGGSLRLSCAASGFTFSSYAMSWVRQAPGKGLEWVSTIYGSGDYTYYADSVKGRFTISRDNSKNTLYLQMNSLRAEDTAVYYCAKSGPGLRQVGFDYWGQGTLVTVSS

SEQ ID NO: 2488 - protein, 121 aa, synthetic construct
  source 1..121: note = 1A7[CD28]_H1.33
EVQLLESGGGLVQPGGSLRLSCAASGFTFSSYAMSWVRQAPGKGLEWVSTISDSGTSTYYADSVKGRFTISRDNSKNTLYLQMNSLRAEDTAVYYCAKSGPGLRQVGFDYWGQGTLVTVSS

SEQ ID NO: 2489 - protein, 121 aa, synthetic construct
  source 1..121: note = 1A7[CD28]_H1.34
EVQLLESGGGLVQPGGSLRLSCAASGFTFSSYAMSWVRQAPGKGLEWVSTISDSGYSTYYADSVKGRFTISRDNSKNTLYLQMNSLRAEDTAVYYCAKSGPGLRQVGFDYWGQGTLVTVSS

SEQ ID NO: 2490 - protein, 121 aa, synthetic construct
  source 1..121: note = 1A7[CD28]_H1.35
EVQLLESGGGLVQPGGSLRLSCAASGFTFSSYAMSWVRQAPGKGLEWVSTISDSGDYTYYADSVKGRFTISRDNSKNTLYLQMNSLRAEDTAVYYCAKSGPGLRQVGFDYWGQGTLVTVSS

SEQ ID NO: 2491 - protein, 121 aa, synthetic construct
  source 1..121: note = 1A7[CD28]_H1.36
EVQLLESGGGLVQPGGSLRLSCAASGFTFSSYAMSWVRQAPGKGLEWVSTISESGTSTYYADSVKGRFTISRDNSKNTLYLQMNSLRAEDTAVYYCAKSGPGLRQVGFDYWGQGTLVTVSS

SEQ ID NO: 2492 - protein, 121 aa, synthetic construct
  source 1..121: note = 1A7[CD28]_H1.37
EVQLLESGGGLVQPGGSLRLSCAASGFTFSSYAMSWVRQAPGKGLEWVSTISESGYSTYYADSVKGRFTISRDNSKNTLYLQMNSLRAEDTAVYYCAKSGPGLRQVGFDYWGQGTLVTVSS

SEQ ID NO: 2493 - protein, 121 aa, synthetic construct
  source 1..121: note = 1A7[CD28]_H1.38
EVQLLESGGGLVQPGGSLRLSCAASGFTFSSYAMSWVRQAPGKGLEWVSTISESGDYTYYADSVKGRFTISRDNSKNTLYLQMNSLRAEDTAVYYCAKSGPGLRQVGFDYWGQGTLVTVSS

SEQ ID NO: 2494 - protein, 121 aa, synthetic construct
  source 1..121: note = 1A7[CD28]_H1.39
EVQLLESGGGLVQPGGSLRLSCAASGFTFSSYAMSWVRQAPGKGLEWVSTISGSGTYTYYADSVKGRFTISRDNSKNTLYLQMNSLRAEDTAVYYCAKSGPGLRQVGFDYWGQGTLVTVSS

SEQ ID NO: 2495 - protein, 121 aa, synthetic construct
  source 1..121: note = 1A7[CD28]_H1.40
EVQLLESGGGLVQPGGSLRLSCAASGFTFSSYAMSWVRQAPGKGLEWVSTISGSGYYTYYADSVKGRFTISRDNSKNTLYLQMNSLRAEDTAVYYCAKSGPGLRQVGFDYWGQGTLVTVSS

SEQ ID NO: 2496 - protein, 121 aa, synthetic construct
  source 1..121: note = 1A7[CD28]_H1.41
EVQLLESGGGLVQPGGSLRLSCAASGFTFSSYYMSWVRQAPGKGLEWVSTIEGSGDYTYYADSVKGRFTISRDNSKNTLYLQMNSLRAEDTAVYYCAKSGPGLRQVGFDYWGQGTLVTVSS

SEQ ID NO: 2497 - protein, 121 aa, synthetic construct
  source 1..121: note = 1A7[CD28]_H1.42
EVQLLESGGGLVQPGGSLRLSCAASGFTFSSYYMSWVRQAPGKGLEWVSTISESGDYTYYADSVKGRFTISRDNSKNTLYLQMNSLRAEDTAVYYCAKSGPGLRQVGFDYWGQGTLVTVSS

SEQ ID NO: 2498 - protein, 121 aa, synthetic construct
  source 1..121: note = 1A7[CD28]_H1.43
EVQLLESGGGLVQPGGSLRLSCAASGFSFSGNYMTWVRQAPGKGLEWVATITADSDATYYADSVKGRFTISRDNSKNTLYLQMNSLRAEDTAVYYCAKSGPGLRQVGFDYWGQGTLVTVSS

SEQ ID NO: 2499 - protein, 121 aa, synthetic construct
  source 1..121: note = 1A7[CD28]_H1.44
EVQLLESGGGLVQPGGSLRLSCAASGFTFSGYSMNWVRQAPGKGLEWVATIYANGSYTYYADSVKGRFTISRDNSKNTLYLQMNSLRAEDTAVYYCAKSGPGLRQVGFDYWGQGTLVTVSS

SEQ ID NO: 2500 - protein, 121 aa, synthetic construct
  source 1..121: note = 1A7[CD28]_H1.45
EVQLLESGGGLVQPGGSLRLSCAASGFNFEEYSMNWVRQAPGKGLEWVATITYNGDYTYYADSVKGRFTISRDNSKNTLYLQMNSLRAEDTAVYYCAKSGPGLRQVGFDYWGQGTLVTVSS

SEQ ID NO: 2501 - protein, 121 aa, synthetic construct
  source 1..121: note = 1A7[CD28]_H1.46
EVQLLESGGGLVQPGGSLRLSCAASGFSFRTYYMTWVRQAPGKGLEWVATITSDGDYTYYADSVKGRFTISRDNSKNTLYLQMNSLRAEDTAVYYCAKSGPGLRQVGFDYWGQGTLVTVSS

SEQ ID NO: 2502 - protein, 121 aa, synthetic construct
  source 1..121: note = 1A7[CD28]_H1.47
EVQLLESGGGLVQPGGSLRLSCAASGFSFKGYSMNWVRQAPGKGLEWVATIYASSDSTYYADSVKGRFTISRDNSKNTLYLQMNSLRAEDTAVYYCAKSGPGLRQVGFDYWGQGTLVTVSS

SEQ ID NO: 2503 - protein, 121 aa, synthetic construct
  source 1..121: note = 1A7[CD28]_H1.48
EVQLLESGGGLVQPGGSLRLSCAASGFSFGEYSMNWVRQAPGKGLEWVSTIYADGDYTYYADSVKGRFTISRDNSKNTLYLQMNSLRAEDTAVYYCAKSGPGLRQVGFDYWGQGTLVTVSS

SEQ ID NO: 2504 - protein, 121 aa, synthetic construct
  source 1..121: note = 1A7[CD28]_H1.49
EVQLLESGGGLVQPGGSLRLSCAASGFTFTDYSMNWVRQAPGKGLEWVATIYADSSSTYYADSVKGRFTISRDNSKNTLYLQMNSLRAEDTAVYYCAKSGPGLRQVGFDYWGQGTLVTVSS

SEQ ID NO: 2505 - protein, 121 aa, synthetic construct
  source 1..121: note = 1A7[CD28]_H1.50
EVQLLESGGGLVQPGGSLRLSCAASGFTFGGYSMNWVRQAPGKGLEWVATIYYDSTTTYYADSVKGRFTISRDNSKNTLYLQMNSLRAEDTAVYYCAKSGPGLRQVGFDYWGQGTLVTVSS

SEQ ID NO: 2506 - protein, 121 aa, synthetic construct
  source 1..121: note = 1A7[CD28]_H1.51
EVQLLESGGGLVQPGGSLRLSCAASGFTFGAYSMNWVRQAPGKGLEWVSTIYNDGATTYYADSVKGRFTISRDNSKNTLYLQMNSLRAEDTAVYYCAKSGPGLRQVGFDYWGQGTLVTVSS

SEQ ID NO: 2507 - protein, 121 aa, synthetic construct
  source 1..121: note = 1A7[CD28]_H1.52
EVQLLESGGGLVQPGGSLRLSCAASGFSFEAYSMNWVRQAPGKGLEWVATIYYDSSYTYYADSVKGRFTISRDNSKNTLYLQMNSLRAEDTAVYYCAKSGPGLRQVGFDYWGQGTLVTVSS

SEQ ID NO: 2508 - protein, 121 aa, synthetic construct
  source 1..121: note = 1A7[CD28]_H1.53
EVQLLESGGGLVQPGGSLRLSCAASGFSFGSYYMSWVRQAPGKGLEWVASIYYGGYDTYYADSVKGRFTISRDNSKNTLYLQMNSLRAEDTAVYYCAKSGPGLRQVGFDYWGQGTLVTVSS

SEQ ID NO: 2509 - protein, 121 aa, synthetic construct
  source 1..121: note = 1A7[CD28]_H1.54
EVQLLESGGGLVQPGGSLRLSCAASGFNFAEYSMSWVRQAPGKGLEWVATIYAGSDYTYYADSVKGRFTISRDNSKNTLYLQMNSLRAEDTAVYYCAKSGPGLRQVGFDYWGQGTLVTVSS

SEQ ID NO: 2510 - protein, 121 aa, synthetic construct
  source 1..121: note = 1A7[CD28]_H1.55
EVQLLESGGGLVQPGGSLRLSCAASGFTFGAYSINWVRQAPGKGLEWVATIYYDGSYTYYADSVKGRFTISRDNSKNTLYLQMNSLRAEDTAVYYCAKSGPGLRQVGFDYWGQGTLVTVSS

SEQ ID NO: 2511 - protein, 121 aa, synthetic construct
  source 1..121: note = 1A7[CD28]_H1.56
EVQLLESGGGLVQPGGSLRLSCAASGFTFSRYYINWVRQAPGKGLEWVASIYDGGADTYYADSVKGRFTISRDNSKNTLYLQMNSLRAEDTAVYYCAKSGPGLRQVGFDYWGQGTLVTVSS

SEQ ID NO: 2512 - protein, 121 aa, synthetic construct
  source 1..121: note = 1A7[CD28]_H1.57
EVQLLESGGGLVQPGGSLRLSCAASGFSFGTYSINWVRQAPGKGLEWVSTIYYDGASTYYADSVKGRFTISRDNSKNTLYLQMNSLRAEDTAVYYCAKSGPGLRQVGFDYWGQGTLVTVSS

SEQ ID NO: 2513 - protein, 121 aa, synthetic construct
  source 1..121: note = 1A7[CD28]_H1.58
EVQLLESGGGLVQPGGSLRLSCAASGFTFGKYSISWVRQAPGKGLEWVATIYNDGYYTYYADSVKGRFTISRDNSKNTLYLQMNSLRAEDTAVYYCAKSGPGLRQVGFDYWGQGTLVTVSS

SEQ ID NO: 2514 - protein, 121 aa, synthetic construct
  source 1..121: note = 1A7[CD28]_H1.59
EVQLLESGGGLVQPGGSLRLSCAASGFSFEKYYISWVRQAPGKGLEWVASIYDGSYDTYYADSVKGRFTISRDNSKNTLYLQMNSLRAEDTAVYYCAKSGPGLRQVGFDYWGQGTLVTVSS

SEQ ID NO: 2515 - protein, 121 aa, synthetic construct
  source 1..121: note = 1A7[CD28]_H1.60
EVQLLESGGGLVQPGGSLRLSCAASGFSFGTYSMNWVRQAPGKGLEWVATIDYDGSNTYYADSVKGRFTISRDNSKNTLYLQMNSLRAEDTAVYYCAKSGPGLRQVGFDYWGQGTLVTVSS

SEQ ID NO: 2516 - protein, 121 aa, synthetic construct
  source 1..121: note = 1A7[CD28]_H1.61
EVQLLESGGGLVQPGGSLRLSCAASGFSFAAYSMSWVRQAPGKGLEWVATIYAGSDYTYYADSVKGRFTISRDNSKNTLYLQMNSLRAEDTAVYYCAKSGPGLRQVGFDYWGQGTLVTVSS

SEQ ID NO: 2517 - protein, 121 aa, synthetic construct
  source 1..121: note = 1A7[CD28]_H1.62
EVQLLESGGGLVQPGGSLRLSCAASGFTFTTYSMTWVRQAPGKGLEWVATIYNDGYYTYYADSVKGRFTISRDNSKNTLYLQMNSLRAEDTAVYYCAKSGPGLRQVGFDYWGQGTLVTVSS

SEQ ID NO: 2518 - protein, 121 aa, synthetic construct
  source 1..121: note = 1A7[CD28]_H1.63
EVQLLESGGGLVQPGGSLRLSCAASGFSFKDYSMNWVRQAPGKGLEWVATIYYDGTYTYYADSVKGRFTISRDNSKNTLYLQMNSLRAEDTAVYYCAKSGPGLRQVGFDYWGQGTLVTVSS

SEQ ID NO: 2519 - protein, 121 aa, synthetic construct
  source 1..121: note = 1A7[CD28]_H1.64
EVQLLESGGGLVQPGGSLRLSCAASGFSFAAYSMNWVRQAPGKGLEWVATIYAGGAYTYYADSVKGRFTISRDNSKNTLYLQMNSLRAEDTAVYYCAKSGPGLRQVGFDYWGQGTLVTVSS

SEQ ID NO: 2520 - protein, 121 aa, synthetic construct
  source 1..121: note = 1A7[CD28]_H1.65
EVQLLESGGGLVQPGGSLRLSCAASGFNFAEYYISWVRQAPGKGLEWVASIYNGGSDTYYADSVKGRFTISRDNSKNTLYLQMNSLRAEDTAVYYCAKSGPGLRQVGFDYWGQGTLVTVSS

SEQ ID NO: 2521 - protein, 121 aa, synthetic construct
  source 1..121: note = 1A7[CD28]_H1.66
EVQLLESGGGLVQPGGSLRLSCAASGFSLGEYYMNWVRQAPGKGLEWVSTIDYDGTYTYYADSVKGRFTISRDNSKNTLYLQMNSLRAEDTAVYYCAKSGPGLRQVGFDYWGQGTLVTVSS

SEQ ID NO: 2522 - protein, 121 aa, synthetic construct
  source 1..121: note = 1A7[CD28]_H1.67
EVQLLESGGGLVQPGGSLRLSCAASGFTFNEYYITWVRQAPGKGLEWVSSIYSSSYDTYYADSVKGRFTISRDNSKNTLYLQMNSLRAEDTAVYYCAKSGPGLRQVGFDYWGQGTLVTVSS

SEQ ID NO: 2523 - protein, 121 aa, synthetic construct
  source 1..121: note = 1A7[CD28]_H1.68
EVQLLESGGGLVQPGGSLRLSCAASGFTFKDYYITWVRQAPGKGLEWVSSIYTSGYDTYYADSVKGRFTISRDNSKNTLYLQMNSLRAEDTAVYYCAKSGPGLRQVGFDYWGQGTLVTVSS

SEQ ID NO: 2524 - protein, 121 aa, synthetic construct
  source 1..121: note = 1A7[CD28]_H1.69
EVQLLESGGGLVQPGGSLRLSCAASGFSFGKYSINWVRQAPGKGLEWVATIYSDGTDTYYADSVKGRFTISRDNSKNTLYLQMNSLRAEDTAVYYCAKSGPGLRQVGFDYWGQGTLVTVSS

SEQ ID NO: 2525 - protein, 107 aa, synthetic construct
  source 1..107: note = 1A7[CD28]_L1.1
DIQMTQSPSSLSASVGDRVTITCRASQSISAYLNWYQQKPGKAPKLLIYAASSLQSGVPSRFSGSGSGTDFTLTISSLQPEDFATYYCQQSYSTPFTFGQGTKLEIK

SEQ ID NO: 2526 - protein, 107 aa, synthetic construct
  source 1..107: note = 1A7[CD28]_L1.2
DIQMTQSPSSLSASVGDRVTITCRASQSISDYLNWYQQKPGKAPKLLIYAASSLQSGVPSRFSGSGSGTDFTLTISSLQPEDFATYYCQQSYSTPFTFGQGTKLEIK

SEQ ID NO: 2527 - protein, 107 aa, synthetic construct
  source 1..107: note = 1A7[CD28]_L1.3
DIQMTQSPSSLSASVGDRVTITCRASQSISGYLNWYQQKPGKAPKLLIYAASSLQSGVPSRFSGSGSGTDFTLTISSLQPEDFATYYCQQSYSTPFTFGQGTKLEIK

SEQ ID NO: 2528 - protein, 107 aa, synthetic construct
  source 1..107: note = 1A7[CD28]_L1.4
DIQMTQSPSSLSASVGDRVTITCRASQSISHYLNWYQQKPGKAPKLLIYAASSLQSGVPSRFSGSGSGTDFTLTISSLQPEDFATYYCQQSYSTPFTFGQGTKLEIK

SEQ ID NO: 2529 - protein, 107 aa, synthetic construct
  source 1..107: note = 1A7[CD28]_L1.5
DIQMTQSPSSLSASVGDRVTITCRASQSISKYLNWYQQKPGKAPKLLIYAASSLQSGVPSRFSGSGSGTDFTLTISSLQPEDFATYYCQQSYSTPFTFGQGTKLEIK

SEQ ID NO: 2530 - protein, 107 aa, synthetic construct
  source 1..107: note = 1A7[CD28]_L1.6
DIQMTQSPSSLSASVGDRVTITCRASQSISNYLNWYQQKPGKAPKLLIYAASSLQSGVPSRFSGSGSGTDFTLTISSLQPEDFATYYCQQSYSTPFTFGQGTKLEIK

SEQ ID NO: 2531 - protein, 107 aa, synthetic construct
  source 1..107: note = 1A7[CD28]_L1.7
DIQMTQSPSSLSASVGDRVTITCRASQSISQYLNWYQQKPGKAPKLLIYAASSLQSGVPSRFSGSGSGTDFTLTISSLQPEDFATYYCQQSYSTPFTFGQGTKLEIK

SEQ ID NO: 2532 - protein, 107 aa, synthetic construct
  source 1..107: note = 1A7[CD28]_L1.8
DIQMTQSPSSLSASVGDRVTITCRASQSISTYLNWYQQKPGKAPKLLIYAASSLQSGVPSRFSGSGSGTDFTLTISSLQPEDFATYYCQQSYSTPFTFGQGTKLEIK

SEQ ID NO: 2533 - protein, 107 aa, synthetic construct
  source 1..107: note = 1A7[CD28]_L1.9
DIQMTQSPSSLSASVGDRVTITCRASQSISVYLNWYQQKPGKAPKLLIYAASSLQSGVPSRFSGSGSGTDFTLTISSLQPEDFATYYCQQSYSTPFTFGQGTKLEIK

SEQ ID NO: 2534 - protein, 107 aa, synthetic construct
  source 1..107: note = 1A7[CD28]_L1.10
DIQMTQSPSSLSASVGDRVTITCRASQSISYYLNWYQQKPGKAPKLLIYAASSLQSGVPSRFSGSGSGTDFTLTISSLQPEDFATYYCQQSYSTPFTFGQGTKLEIK

SEQ ID NO: 2535 - protein, 107 aa, synthetic construct
  source 1..107: note = 1A7[CD28]_L1.11
DIQMTQSPSSLSASVGDRVTITCRASQSISSALNWYQQKPGKAPKLLIYAASSLQSGVPSRFSGSGSGTDFTLTISSLQPEDFATYYCQQSYSTPFTFGQGTKLEIK

SEQ ID NO: 2536 - protein, 107 aa, synthetic construct
  source 1..107: note = 1A7[CD28]_L1.12
DIQMTQSPSSLSASVGDRVTITCRASQSISSDLNWYQQKPGKAPKLLIYAASSLQSGVPSRFSGSGSGTDFTLTISSLQPEDFATYYCQQSYSTPFTFGQGTKLEIK

SEQ ID NO: 2537 - protein, 107 aa, synthetic construct
  source 1..107: note = 1A7[CD28]_L1.13
DIQMTQSPSSLSASVGDRVTITCRASQSISSFLNWYQQKPGKAPKLLIYAASSLQSGVPSRFSGSGSGTDFTLTISSLQPEDFATYYCQQSYSTPFTFGQGTKLEIK

SEQ ID NO: 2538 - protein, 107 aa, synthetic construct
  source 1..107: note = 1A7[CD28]_L1.14
DIQMTQSPSSLSASVGDRVTITCRASQSISSHLNWYQQKPGKAPKLLIYAASSLQSGVPSRFSGSGSGTDFTLTISSLQPEDFATYYCQQSYSTPFTFGQGTKLEIK

SEQ ID NO: 2539 - protein, 107 aa, synthetic construct
  source 1..107: note = 1A7[CD28]_L1.15
DIQMTQSPSSLSASVGDRVTITCRASQSISSKLNWYQQKPGKAPKLLIYAASSLQSGVPSRFSGSGSGTDFTLTISSLQPEDFATYYCQQSYSTPFTFGQGTKLEIK

SEQ ID NO: 2540 - protein, 107 aa, synthetic construct
  source 1..107: note = 1A7[CD28]_L1.16
DIQMTQSPSSLSASVGDRVTITCRASQSISSLLNWYQQKPGKAPKLLIYAASSLQSGVPSRFSGSGSGTDFTLTISSLQPEDFATYYCQQSYSTPFTFGQGTKLEIK

SEQ ID NO: 2541 - protein, 107 aa, synthetic construct
  source 1..107: note = 1A7[CD28]_L1.17
DIQMTQSPSSLSASVGDRVTITCRASQSISSNLNWYQQKPGKAPKLLIYAASSLQSGVPSRFSGSGSGTDFTLTISSLQPEDFATYYCQQSYSTPFTFGQGTKLEIK

SEQ ID NO: 2542 - protein, 107 aa, synthetic construct
  source 1..107: note = 1A7[CD28]_L1.18
DIQMTQSPSSLSASVGDRVTITCRASQSISSQLNWYQQKPGKAPKLLIYAASSLQSGVPSRFSGSGSGTDFTLTISSLQPEDFATYYCQQSYSTPFTFGQGTKLEIK

SEQ ID NO: 2543 - protein, 107 aa, synthetic construct
  source 1..107: note = 1A7[CD28]_L1.19
DIQMTQSPSSLSASVGDRVTITCRASQSISSSLNWYQQKPGKAPKLLIYAASSLQSGVPSRFSGSGSGTDFTLTISSLQPEDFATYYCQQSYSTPFTFGQGTKLEIK

SEQ ID NO: 2544 - protein, 107 aa, synthetic construct
  source 1..107: note = 1A7[CD28]_L1.20
DIQMTQSPSSLSASVGDRVTITCRASQSISSWLNWYQQKPGKAPKLLIYAASSLQSGVPSRFSGSGSGTDFTLTISSLQPEDFATYYCQQSYSTPFTFGQGTKLEIK

SEQ ID NO: 2545 - protein, 107 aa, synthetic construct
  source 1..107: note = 1A7[CD28]_L1.21
DIQMTQSPSSLSASVGDRVTITCRASQSISSYLAWYQQKPGKAPKLLIYAASSLQSGVPSRFSGSGSGTDFTLTISSLQPEDFATYYCQQSYSTPFTFGQGTKLEIK

SEQ ID NO: 2546 - protein, 107 aa, synthetic construct
  source 1..107: note = 1A7[CD28]_L1.22
DIQMTQSPSSLSASVGDRVTITCRASQSISSYLDWYQQKPGKAPKLLIYAASSLQSGVPSRFSGSGSGTDFTLTISSLQPEDFATYYCQQSYSTPFTFGQGTKLEIK

SEQ ID NO: 2547 - protein, 107 aa, synthetic construct
  source 1..107: note = 1A7[CD28]_L1.23
DIQMTQSPSSLSASVGDRVTITCRASQSISSYLGWYQQKPGKAPKLLIYAASSLQSGVPSRFSGSGSGTDFTLTISSLQPEDFATYYCQQSYSTPFTFGQGTKLEIK

SEQ ID NO: 2548 - protein, 107 aa, synthetic construct
  source 1..107: note = 1A7[CD28]_L1.24
DIQMTQSPSSLSASVGDRVTITCRASQSISSYLHWYQQKPGKAPKLLIYAASSLQSGVPSRFSGSGSGTDFTLTISSLQPEDFATYYCQQSYSTPFTFGQGTKLEIK

SEQ ID NO: 2549 - protein, 107 aa, synthetic construct
  source 1..107: note = 1A7[CD28]_L1.25
DIQMTQSPSSLSASVGDRVTITCRASQSISSYLQWYQQKPGKAPKLLIYAASSLQSGVPSRFSGSGSGTDFTLTISSLQPEDFATYYCQQSYSTPFTFGQGTKLEIK

SEQ ID NO: 2550 - protein, 107 aa, synthetic construct
  source 1..107: note = 1A7[CD28]_L1.26
DIQMTQSPSSLSASVGDRVTITCRASQSISSYLSWYQQKPGKAPKLLIYAASSLQSGVPSRFSGSGSGTDFTLTISSLQPEDFATYYCQQSYSTPFTFGQGTKLEIK

SEQ ID NO: 2551 - protein, 107 aa, synthetic construct
  source 1..107: note = 1A7[CD28]_L1.27
DIQMTQSPSSLSASVGDRVTITCRASQSISSYLTWYQQKPGKAPKLLIYAASSLQSGVPSRFSGSGSGTDFTLTISSLQPEDFATYYCQQSYSTPFTFGQGTKLEIK

SEQ ID NO: 2552 - protein, 107 aa, synthetic construct
  source 1..107: note = 1A7[CD28]_L1.28
DIQMTQSPSSLSASVGDRVTITCRASQSISSYLYWYQQKPGKAPKLLIYAASSLQSGVPSRFSGSGSGTDFTLTISSLQPEDFATYYCQQSYSTPFTFGQGTKLEIK

SEQ ID NO: 2553 - protein, 107 aa, synthetic construct
  source 1..107: note = 1A7[CD28]_L1.29
DIQMTQSPSSLSASVGDRVTITCRASQSISSYLNWYQQKPGKAPKLLIYDASSLQSGVPSRFSGSGSGTDFTLTISSLQPEDFATYYCQQSYSTPFTFGQGTKLEIK

SEQ ID NO: 2554 - protein, 107 aa, synthetic construct
  source 1..107: note = 1A7[CD28]_L1.30
DIQMTQSPSSLSASVGDRVTITCRASQSISSYLNWYQQKPGKAPKLLIYGASSLQSGVPSRFSGSGSGTDFTLTISSLQPEDFATYYCQQSYSTPFTFGQGTKLEIK

SEQ ID NO: 2555 - protein, 107 aa, synthetic construct
  source 1..107: note = 1A7[CD28]_L1.31
DIQMTQSPSSLSASVGDRVTITCRASQSISSYLNWYQQKPGKAPKLLIYKASSLQSGVPSRFSGSGSGTDFTLTISSLQPEDFATYYCQQSYSTPFTFGQGTKLEIK

SEQ ID NO: 2556 - protein, 107 aa, synthetic construct
  source 1..107: note = 1A7[CD28]_L1.32
DIQMTQSPSSLSASVGDRVTITCRASQSISSYLNWYQQKPGKAPKLLIYLASSLQSGVPSRFSGSGSGTDFTLTISSLQPEDFATYYCQQSYSTPFTFGQGTKLEIK

SEQ ID NO: 2557 - protein, 107 aa, synthetic construct
  source 1..107: note = 1A7[CD28]_L1.33
DIQMTQSPSSLSASVGDRVTITCRASQSISSYLNWYQQKPGKAPKLLIYQASSLQSGVPSRFSGSGSGTDFTLTISSLQPEDFATYYCQQSYSTPFTFGQGTKLEIK

SEQ ID NO: 2558 - protein, 107 aa, synthetic construct
  source 1..107: note = 1A7[CD28]_L1.34
DIQMTQSPSSLSASVGDRVTITCRASQSISSYLNWYQQKPGKAPKLLIYSASSLQSGVPSRFSGSGSGTDFTLTISSLQPEDFATYYCQQSYSTPFTFGQGTKLEIK

SEQ ID NO: 2559 - protein, 107 aa, synthetic construct
  source 1..107: note = 1A7[CD28]_L1.35
DIQMTQSPSSLSASVGDRVTITCRASQSISSYLNWYQQKPGKAPKLLIYTASSLQSGVPSRFSGSGSGTDFTLTISSLQPEDFATYYCQQSYSTPFTFGQGTKLEIK

SEQ ID NO: 2560 - protein, 107 aa, synthetic construct
  source 1..107: note = 1A7[CD28]_L1.36
DIQMTQSPSSLSASVGDRVTITCRASQSISSYLNWYQQKPGKAPKLLIYWASSLQSGVPSRFSGSGSGTDFTLTISSLQPEDFATYYCQQSYSTPFTFGQGTKLEIK

SEQ ID NO: 2561 - protein, 107 aa, synthetic construct
  source 1..107: note = 1A7[CD28]_L1.37
DIQMTQSPSSLSASVGDRVTITCRASQSISSYLNWYQQKPGKAPKLLIYYASSLQSGVPSRFSGSGSGTDFTLTISSLQPEDFATYYCQQSYSTPFTFGQGTKLEIK

SEQ ID NO: 2562 - protein, 107 aa, synthetic construct
  source 1..107: note = 1A7[CD28]_L1.38
DIQMTQSPSSLSASVGDRVTITCRASQSISSYLNWYQQKPGKAPKLLIYAASALQSGVPSRFSGSGSGTDFTLTISSLQPEDFATYYCQQSYSTPFTFGQGTKLEIK

SEQ ID NO: 2563 - protein, 107 aa, synthetic construct
  source 1..107: note = 1A7[CD28]_L1.39
DIQMTQSPSSLSASVGDRVTITCRASQSISSYLNWYQQKPGKAPKLLIYAASDLQSGVPSRFSGSGSGTDFTLTISSLQPEDFATYYCQQSYSTPFTFGQGTKLEIK

SEQ ID NO: 2564 - protein, 107 aa, synthetic construct
  source 1..107: note = 1A7[CD28]_L1.40
DIQMTQSPSSLSASVGDRVTITCRASQSISSYLNWYQQKPGKAPKLLIYAASKLQSGVPSRFSGSGSGTDFTLTISSLQPEDFATYYCQQSYSTPFTFGQGTKLEIK

SEQ ID NO: 2565 - protein, 107 aa, synthetic construct
  source 1..107: note = 1A7[CD28]_L1.41
DIQMTQSPSSLSASVGDRVTITCRASQSISSYLNWYQQKPGKAPKLLIYAASNLQSGVPSRFSGSGSGTDFTLTISSLQPEDFATYYCQQSYSTPFTFGQGTKLEIK

SEQ ID NO: 2566 - protein, 107 aa, synthetic construct
  source 1..107: note = 1A7[CD28]_L1.42
DIQMTQSPSSLSASVGDRVTITCRASQSISSYLNWYQQKPGKAPKLLIYAASQLQSGVPSRFSGSGSGTDFTLTISSLQPEDFATYYCQQSYSTPFTFGQGTKLEIK

SEQ ID NO: 2567 - protein, 107 aa, synthetic construct
  source 1..107: note = 1A7[CD28]_L1.43
DIQMTQSPSSLSASVGDRVTITCRASQSISSYLNWYQQKPGKAPKLLIYAASTLQSGVPSRFSGSGSGTDFTLTISSLQPEDFATYYCQQSYSTPFTFGQGTKLEIK

SEQ ID NO: 2568 - protein, 107 aa, synthetic construct
  source 1..107: note = 1A7[CD28]_L1.44
DIQMTQSPSSLSASVGDRVTITCRASQSISSYLNWYQQKPGKAPKLLIYAASYLQSGVPSRFSGSGSGTDFTLTISSLQPEDFATYYCQQSYSTPFTFGQGTKLEIK

SEQ ID NO: 2569 - protein, 107 aa, synthetic construct
  source 1..107: note = 1A7[CD28]_L1.45
DIQMTQSPSSLSASVGDRVTITCRASQSISSYLNWYQQKPGKAPKLLIYAASSLASGVPSRFSGSGSGTDFTLTISSLQPEDFATYYCQQSYSTPFTFGQGTKLEIK

SEQ ID NO: 2570 - protein, 107 aa, synthetic construct
  source 1..107: note = 1A7[CD28]_L1.46
DIQMTQSPSSLSASVGDRVTITCRASQSISSYLNWYQQKPGKAPKLLIYAASSLESGVPSRFSGSGSGTDFTLTISSLQPEDFATYYCQQSYSTPFTFGQGTKLEIK

SEQ ID NO: 2571 - protein, 107 aa, synthetic construct
  source 1..107: note = 1A7[CD28]_L1.47
DIQMTQSPSSLSASVGDRVTITCRASQSISSYLNWYQQKPGKAPKLLIYAASSLFSGVPSRFSGSGSGTDFTLTISSLQPEDFATYYCQQSYSTPFTFGQGTKLEIK

SEQ ID NO: 2572 - protein, 107 aa, synthetic construct
  source 1..107: note = 1A7[CD28]_L1.48
DIQMTQSPSSLSASVGDRVTITCRASQSISSYLNWYQQKPGKAPKLLIYAASSLHSGVPSRFSGSGSGTDFTLTISSLQPEDFATYYCQQSYSTPFTFGQGTKLEIK

SEQ ID NO: 2573 - protein, 107 aa, synthetic construct
  source 1..107: note = 1A7[CD28]_L1.49
DIQMTQSPSSLSASVGDRVTITCRASQSISSYLNWYQQKPGKAPKLLIYAASSLISGVPSRFSGSGSGTDFTLTISSLQPEDFATYYCQQSYSTPFTFGQGTKLEIK

SEQ ID NO: 2574 - protein, 107 aa, synthetic construct
  source 1..107: note = 1A7[CD28]_L1.50
DIQMTQSPSSLSASVGDRVTITCRASQSISSYLNWYQQKPGKAPKLLIYAASSLKSGVPSRFSGSGSGTDFTLTISSLQPEDFATYYCQQSYSTPFTFGQGTKLEIK

SEQ ID NO: 2575 - protein, 107 aa, synthetic construct
  source 1..107: note = 1A7[CD28]_L1.51
DIQMTQSPSSLSASVGDRVTITCRASQSISSYLNWYQQKPGKAPKLLIYAASSLNSGVPSRFSGSGSGTDFTLTISSLQPEDFATYYCQQSYSTPFTFGQGTKLEIK

SEQ ID NO: 2576 - protein, 107 aa, synthetic construct
  source 1..107: note = 1A7[CD28]_L1.52
DIQMTQSPSSLSASVGDRVTITCRASQSISSYLNWYQQKPGKAPKLLIYAASSLSSGVPSRFSGSGSGTDFTLTISSLQPEDFATYYCQQSYSTPFTFGQGTKLEIK

SEQ ID NO: 2577 - protein, 107 aa, synthetic construct
  source 1..107: note = 1A7[CD28]_L1.53
DIQMTQSPSSLSASVGDRVTITCRASQSISSYLNWYQQKPGKAPKLLIYAASSLVSGVPSRFSGSGSGTDFTLTISSLQPEDFATYYCQQSYSTPFTFGQGTKLEIK

SEQ ID NO: 2578 - protein, 107 aa, synthetic construct
  source 1..107: note = 1A7[CD28]_L1.54
DIQMTQSPSSLSASVGDRVTITCRASQSISSYLNWYQQKPGKAPKLLIYAASSLYSGVPSRFSGSGSGTDFTLTISSLQPEDFATYYCQQSYSTPFTFGQGTKLEIK

SEQ ID NO: 2579 - protein, 107 aa, synthetic construct
  source 1..107: note = 1A7[CD28]_L1.55
DIQMTQSPSSLSASVGDRVTITCRASQSISSYLNWYQQKPGKAPKLLIYAASSLQAGVPSRFSGSGSGTDFTLTISSLQPEDFATYYCQQSYSTPFTFGQGTKLEIK

SEQ ID NO: 2580 - protein, 107 aa, synthetic construct
  source 1..107: note = 1A7[CD28]_L1.56
DIQMTQSPSSLSASVGDRVTITCRASQSISSYLNWYQQKPGKAPKLLIYAASSLQDGVPSRFSGSGSGTDFTLTISSLQPEDFATYYCQQSYSTPFTFGQGTKLEIK

SEQ ID NO: 2581 - protein, 107 aa, synthetic construct
  source 1..107: note = 1A7[CD28]_L1.57
DIQMTQSPSSLSASVGDRVTITCRASQSISSYLNWYQQKPGKAPKLLIYAASSLQGGVPSRFSGSGSGTDFTLTISSLQPEDFATYYCQQSYSTPFTFGQGTKLEIK

SEQ ID NO: 2582 - protein, 107 aa, synthetic construct
  source 1..107: note = 1A7[CD28]_L1.58
DIQMTQSPSSLSASVGDRVTITCRASQSISSYLNWYQQKPGKAPKLLIYAASSLQHGVPSRFSGSGSGTDFTLTISSLQPEDFATYYCQQSYSTPFTFGQGTKLEIK

SEQ ID NO: 2583 - protein, 107 aa, synthetic construct
  source 1..107: note = 1A7[CD28]_L1.59
DIQMTQSPSSLSASVGDRVTITCRASQSISSYLNWYQQKPGKAPKLLIYAASSLQKGVPSRFSGSGSGTDFTLTISSLQPEDFATYYCQQSYSTPFTFGQGTKLEIK

SEQ ID NO: 2584 - protein, 107 aa, synthetic construct
  source 1..107: note = 1A7[CD28]_L1.60
DIQMTQSPSSLSASVGDRVTITCRASQSISSYLNWYQQKPGKAPKLLIYAASSLQQGVPSRFSGSGSGTDFTLTISSLQPEDFATYYCQQSYSTPFTFGQGTKLEIK

SEQ ID NO: 2585 - protein, 107 aa, synthetic construct
  source 1..107: note = 1A7[CD28]_L1.61
DIQMTQSPSSLSASVGDRVTITCRASQSISSYLNWYQQKPGKAPKLLIYAASSLQTGVPSRFSGSGSGTDFTLTISSLQPEDFATYYCQQSYSTPFTFGQGTKLEIK

SEQ ID NO: 2586 - protein, 107 aa, synthetic construct
  source 1..107: note = 1A7[CD28]_L1.62
DIQMTQSPSSLSASVGDRVTITCRASQSISSYLNWYQQKPGKAPKLLIYAASSLQVGVPSRFSGSGSGTDFTLTISSLQPEDFATYYCQQSYSTPFTFGQGTKLEIK

SEQ ID NO: 2587 - protein, 107 aa, synthetic construct
  source 1..107: note = 1A7[CD28]_L1.63
DIQMTQSPSSLSASVGDRVTITCRASQSISSYLNWYQQKPGKAPKLLIYAASSLQYGVPSRFSGSGSGTDFTLTISSLQPEDFATYYCQQSYSTPFTFGQGTKLEIK

SEQ ID NO: 2588 - protein, 107 aa, synthetic construct
  source 1..107: note = 1A7[CD28]_L1.64
DIQMTQSPSSLSASVGDRVTITCRASQSISSYLNWYQQKPGKAPKLLIYAASSLQSGVPSRFSGSGSGTDFTLTISSLQPEDFATYYCQQAYSTPFTFGQGTKLEIK

SEQ ID NO: 2589 - protein, 107 aa, synthetic construct
  source 1..107: note = 1A7[CD28]_L1.65
DIQMTQSPSSLSASVGDRVTITCRASQSISSYLNWYQQKPGKAPKLLIYAASSLQSGVPSRFSGSGSGTDFTLTISSLQPEDFATYYCQQDYSTPFTFGQGTKLEIK

SEQ ID NO: 2590 - protein, 107 aa, synthetic construct
  source 1..107: note = 1A7[CD28]_L1.66
DIQMTQSPSSLSASVGDRVTITCRASQSISSYLNWYQQKPGKAPKLLIYAASSLQSGVPSRFSGSGSGTDFTLTISSLQPEDFATYYCQQFYSTPFTFGQGTKLEIK

SEQ ID NO: 2591 - protein, 107 aa, synthetic construct
  source 1..107: note = 1A7[CD28]_L1.67
DIQMTQSPSSLSASVGDRVTITCRASQSISSYLNWYQQKPGKAPKLLIYAASSLQSGVPSRFSGSGSGTDFTLTISSLQPEDFATYYCQQHYSTPFTFGQGTKLEIK

SEQ ID NO: 2592 - protein, 107 aa, synthetic construct
  source 1..107: note = 1A7[CD28]_L1.68
DIQMTQSPSSLSASVGDRVTITCRASQSISSYLNWYQQKPGKAPKLLIYAASSLQSGVPSRFSGSGSGTDFTLTISSLQPEDFATYYCQQKYSTPFTFGQGTKLEIK

SEQ ID NO: 2593 - protein, 107 aa, synthetic construct
  source 1..107: note = 1A7[CD28]_L1.69
DIQMTQSPSSLSASVGDRVTITCRASQSISSYLNWYQQKPGKAPKLLIYAASSLQSGVPSRFSGSGSGTDFTLTISSLQPEDFATYYCQQLYSTPFTFGQGTKLEIK

SEQ ID NO: 2594 - protein, 107 aa, synthetic construct
  source 1..107: note = 1A7[CD28]_L1.70
DIQMTQSPSSLSASVGDRVTITCRASQSISSYLNWYQQKPGKAPKLLIYAASSLQSGVPSRFSGSGSGTDFTLTISSLQPEDFATYYCQQTYSTPFTFGQGTKLEIK

SEQ ID NO: 2595 - protein, 107 aa, synthetic construct
  source 1..107: note = 1A7[CD28]_L1.71
DIQMTQSPSSLSASVGDRVTITCRASQSISSYLNWYQQKPGKAPKLLIYAASSLQSGVPSRFSGSGSGTDFTLTISSLQPEDFATYYCQQVYSTPFTFGQGTKLEIK

SEQ ID NO: 2596 - protein, 107 aa, synthetic construct
  source 1..107: note = 1A7[CD28]_L1.72
DIQMTQSPSSLSASVGDRVTITCRASQSISSYLNWYQQKPGKAPKLLIYAASSLQSGVPSRFSGSGSGTDFTLTISSLQPEDFATYYCQQYYSTPFTFGQGTKLEIK

SEQ ID NO: 2597 - protein, 107 aa, synthetic construct
  source 1..107: note = 1A7[CD28]_L1.73
DIQMTQSPSSLSASVGDRVTITCRASQSISSYLNWYQQKPGKAPKLLIYAASSLQSGVPSRFSGSGSGTDFTLTISSLQPEDFATYYCQQSASTPFTFGQGTKLEIK

SEQ ID NO: 2598 - protein, 107 aa, synthetic construct
  source 1..107: note = 1A7[CD28]_L1.74
DIQMTQSPSSLSASVGDRVTITCRASQSISSYLNWYQQKPGKAPKLLIYAASSLQSGVPSRFSGSGSGTDFTLTISSLQPEDFATYYCQQSDSTPFTFGQGTKLEIK

SEQ ID NO: 2599 - protein, 107 aa, synthetic construct
  source 1..107: note = 1A7[CD28]_L1.75
DIQMTQSPSSLSASVGDRVTITCRASQSISSYLNWYQQKPGKAPKLLIYAASSLQSGVPSRFSGSGSGTDFTLTISSLQPEDFATYYCQQSFSTPFTFGQGTKLEIK

SEQ ID NO: 2600 - protein, 107 aa, synthetic construct
  source 1..107: note = 1A7[CD28]_L1.76
DIQMTQSPSSLSASVGDRVTITCRASQSISSYLNWYQQKPGKAPKLLIYAASSLQSGVPSRFSGSGSGTDFTLTISSLQPEDFATYYCQQSHSTPFTFGQGTKLEIK

SEQ ID NO: 2601 - protein, 107 aa, synthetic construct
  source 1..107: note = 1A7[CD28]_L1.77
DIQMTQSPSSLSASVGDRVTITCRASQSISSYLNWYQQKPGKAPKLLIYAASSLQSGVPSRFSGSGSGTDFTLTISSLQPEDFATYYCQQSKSTPFTFGQGTKLEIK

SEQ ID NO: 2602 - protein, 107 aa, synthetic construct
  source 1..107: note = 1A7[CD28]_L1.78
DIQMTQSPSSLSASVGDRVTITCRASQSISSYLNWYQQKPGKAPKLLIYAASSLQSGVPSRFSGSGSGTDFTLTISSLQPEDFATYYCQQSLSTPFTFGQGTKLEIK

SEQ ID NO: 2603 - protein, 107 aa, synthetic construct
  source 1..107: note = 1A7[CD28]_L1.79
DIQMTQSPSSLSASVGDRVTITCRASQSISSYLNWYQQKPGKAPKLLIYAASSLQSGVPSRFSGSGSGTDFTLTISSLQPEDFATYYCQQSQSTPFTFGQGTKLEIK

SEQ ID NO: 2604 - protein, 107 aa, synthetic construct
  source 1..107: note = 1A7[CD28]_L1.80
DIQMTQSPSSLSASVGDRVTITCRASQSISSYLNWYQQKPGKAPKLLIYAASSLQSGVPSRFSGSGSGTDFTLTISSLQPEDFATYYCQQSVSTPFTFGQGTKLEIK

SEQ ID NO: 2605 - protein, 107 aa, synthetic construct
  source 1..107: note = 1A7[CD28]_L1.81
DIQMTQSPSSLSASVGDRVTITCRASQSISSYLNWYQQKPGKAPKLLIYAASSLQSGVPSRFSGSGSGTDFTLTISSLQPEDFATYYCQQSWSTPFTFGQGTKLEIK

SEQ ID NO: 2606 - protein, 107 aa, synthetic construct
  source 1..107: note = 1A7[CD28]_L1.82
DIQMTQSPSSLSASVGDRVTITCRASQSISSYLNWYQQKPGKAPKLLIYAASSLQSGVPSRFSGSGSGTDFTLTISSLQPEDFATYYCQQSYATPFTFGQGTKLEIK

SEQ ID NO: 2607 - protein, 107 aa, synthetic construct
  source 1..107: note = 1A7[CD28]_L1.83
DIQMTQSPSSLSASVGDRVTITCRASQSISSYLNWYQQKPGKAPKLLIYAASSLQSGVPSRFSGSGSGTDFTLTISSLQPEDFATYYCQQSYDTPFTFGQGTKLEIK

SEQ ID NO: 2608 - protein, 107 aa, synthetic construct
  source 1..107: note = 1A7[CD28]_L1.84
DIQMTQSPSSLSASVGDRVTITCRASQSISSYLNWYQQKPGKAPKLLIYAASSLQSGVPSRFSGSGSGTDFTLTISSLQPEDFATYYCQQSYGTPFTFGQGTKLEIK

SEQ ID NO: 2609 - protein, 107 aa, synthetic construct
  source 1..107: note = 1A7[CD28]_L1.85
DIQMTQSPSSLSASVGDRVTITCRASQSISSYLNWYQQKPGKAPKLLIYAASSLQSGVPSRFSGSGSGTDFTLTISSLQPEDFATYYCQQSYHTPFTFGQGTKLEIK

SEQ ID NO: 2610 - protein, 107 aa, synthetic construct
  source 1..107: note = 1A7[CD28]_L1.86
DIQMTQSPSSLSASVGDRVTITCRASQSISSYLNWYQQKPGKAPKLLIYAASSLQSGVPSRFSGSGSGTDFTLTISSLQPEDFATYYCQQSYKTPFTFGQGTKLEIK

SEQ ID NO: 2611 - protein, 107 aa, synthetic construct
  source 1..107: note = 1A7[CD28]_L1.87
DIQMTQSPSSLSASVGDRVTITCRASQSISSYLNWYQQKPGKAPKLLIYAASSLQSGVPSRFSGSGSGTDFTLTISSLQPEDFATYYCQQSYNTPFTFGQGTKLEIK

SEQ ID NO: 2612 - protein, 107 aa, synthetic construct
  source 1..107: note = 1A7[CD28]_L1.88
DIQMTQSPSSLSASVGDRVTITCRASQSISSYLNWYQQKPGKAPKLLIYAASSLQSGVPSRFSGSGSGTDFTLTISSLQPEDFATYYCQQSYQTPFTFGQGTKLEIK

SEQ ID NO: 2613 - protein, 107 aa, synthetic construct
  source 1..107: note = 1A7[CD28]_L1.89
DIQMTQSPSSLSASVGDRVTITCRASQSISSYLNWYQQKPGKAPKLLIYAASSLQSGVPSRFSGSGSGTDFTLTISSLQPEDFATYYCQQSYTTPFTFGQGTKLEIK

SEQ ID NO: 2614 - protein, 107 aa, synthetic construct
  source 1..107: note = 1A7[CD28]_L1.90
DIQMTQSPSSLSASVGDRVTITCRASQSISSYLNWYQQKPGKAPKLLIYAASSLQSGVPSRFSGSGSGTDFTLTISSLQPEDFATYYCQQSYVTPFTFGQGTKLEIK

SEQ ID NO: 2615 - protein, 107 aa, synthetic construct
  source 1..107: note = 1A7[CD28]_L1.91
DIQMTQSPSSLSASVGDRVTITCRASQSISSYLNWYQQKPGKAPKLLIYAASSLQSGVPSRFSGSGSGTDFTLTISSLQPEDFATYYCQQSYYTPFTFGQGTKLEIK

SEQ ID NO: 2616 - protein, 107 aa, synthetic construct
  source 1..107: note = 1A7[CD28]_L1.92
DIQMTQSPSSLSASVGDRVTITCRASQSISSYLNWYQQKPGKAPKLLIYAASSLQSGVPSRFSGSGSGTDFTLTISSLQPEDFATYYCQQSYSAPFTFGQGTKLEIK

SEQ ID NO: 2617 - protein, 107 aa, synthetic construct
  source 1..107: note = 1A7[CD28]_L1.93
DIQMTQSPSSLSASVGDRVTITCRASQSISSYLNWYQQKPGKAPKLLIYAASSLQSGVPSRFSGSGSGTDFTLTISSLQPEDFATYYCQQSYSDPFTFGQGTKLEIK

SEQ ID NO: 2618 - protein, 107 aa, synthetic construct
  source 1..107: note = 1A7[CD28]_L1.94
DIQMTQSPSSLSASVGDRVTITCRASQSISSYLNWYQQKPGKAPKLLIYAASSLQSGVPSRFSGSGSGTDFTLTISSLQPEDFATYYCQQSYSFPFTFGQGTKLEIK

SEQ ID NO: 2619 - protein, 107 aa, synthetic construct
  source 1..107: note = 1A7[CD28]_L1.95
DIQMTQSPSSLSASVGDRVTITCRASQSISSYLNWYQQKPGKAPKLLIYAASSLQSGVPSRFSGSGSGTDFTLTISSLQPEDFATYYCQQSYSIPFTFGQGTKLEIK

SEQ ID NO: 2620 - protein, 107 aa, synthetic construct
  source 1..107: note = 1A7[CD28]_L1.96
DIQMTQSPSSLSASVGDRVTITCRASQSISSYLNWYQQKPGKAPKLLIYAASSLQSGVPSRFSGSGSGTDFTLTISSLQPEDFATYYCQQSYSKPFTFGQGTKLEIK

SEQ ID NO: 2621 - protein, 107 aa, synthetic construct
  source 1..107: note = 1A7[CD28]_L1.97
DIQMTQSPSSLSASVGDRVTITCRASQSISSYLNWYQQKPGKAPKLLIYAASSLQSGVPSRFSGSGSGTDFTLTISSLQPEDFATYYCQQSYSLPFTFGQGTKLEIK

SEQ ID NO: 2622 - protein, 107 aa, synthetic construct
  source 1..107: note = 1A7[CD28]_L1.98
DIQMTQSPSSLSASVGDRVTITCRASQSISSYLNWYQQKPGKAPKLLIYAASSLQSGVPSRFSGSGSGTDFTLTISSLQPEDFATYYCQQSYSQPFTFGQGTKLEIK

SEQ ID NO: 2623 - protein, 107 aa, synthetic construct
  source 1..107: note = 1A7[CD28]_L1.99
DIQMTQSPSSLSASVGDRVTITCRASQSISSYLNWYQQKPGKAPKLLIYAASSLQSGVPSRFSGSGSGTDFTLTISSLQPEDFATYYCQQSYSSPFTFGQGTKLEIK

SEQ ID NO: 2624 - protein, 107 aa, synthetic construct
  source 1..107: note = 1A7[CD28]_L1.100
DIQMTQSPSSLSASVGDRVTITCRASQSISSYLNWYQQKPGKAPKLLIYAASSLQSGVPSRFSGSGSGTDFTLTISSLQPEDFATYYCQQSYSVPFTFGQGTKLEIK

SEQ ID NO: 2625 - protein, 107 aa, synthetic construct
  source 1..107: note = 1A7[CD28]_L1.101
DIQMTQSPSSLSASVGDRVTITCRASQSISSYLNWYQQKPGKAPKLLIYAASSLQSGVPSRFSGSGSGTDFTLTISSLQPEDFATYYCQQSYSYPFTFGQGTKLEIK

SEQ ID NO: 2626 - protein, 107 aa, synthetic construct
  source 1..107: note = 1A7[CD28]_L1.102
DIQMTQSPSSLSASVGDRVTITCRASQSISSYLNWYQQKPGKAPKLLIYAASSLQSGVPSRFSGSGSGTDFTLTISSLQPEDFATYYCQQSYSTPITFGQGTKLEIK

SEQ ID NO: 2627 - protein, 107 aa, synthetic construct
  source 1..107: note = 1A7[CD28]_L1.103
DIQMTQSPSSLSASVGDRVTITCRASQSISSYLNWYQQKPGKAPKLLIYAASSLQSGVPSRFSGSGSGTDFTLTISSLQPEDFATYYCQQSYSTPLTFGQGTKLEIK

SEQ ID NO: 2628 - protein, 107 aa, synthetic construct
  source 1..107: note = 1A7[CD28]_L1.104
DIQMTQSPSSLSASVGDRVTITCRASQSISSYLNWYQQKPGKAPKLLIYAASSLQSGVPSRFSGSGSGTDFTLTISSLQPEDFATYYCQQSYSTPWTFGQGTKLEIK

SEQ ID NO: 2629 - protein, 107 aa, synthetic construct
  source 1..107: note = 1A7[CD28]_L1.105
DIQMTQSPSSLSASVGDRVTITCRASQSISSYLTWYQQKPGKAPKLLIYAASSLQSGVPSRFSGSGSGTDFTLTISSLQPEDFATYYCQQVYSTPFTFGQGTKLEIK

SEQ ID NO: 2630 - protein, 107 aa, synthetic construct
  source 1..107: note = 1A7[CD28]_L1.106
DIQMTQSPSSLSASVGDRVTITCRASQSISSYLTWYQQKPGKAPKLLIYAASSLQSGVPSRFSGSGSGTDFTLTISSLQPEDFATYYCQQSYNTPFTFGQGTKLEIK

SEQ ID NO: 2631 - protein, 121 aa, synthetic construct; identical to SEQ ID NO: 2456
  source 1..121: note = 1A7[CD28]_H1.1_L1 Variable Heavy (vh) Domain

SEQ ID NO: 2632 - protein, 5 aa, synthetic construct
  source 1..5: note = 1A7[CD28]_H1.1_L1 vhCDR1
SYYMS

SEQ ID NO: 2633 - protein, 17 aa, synthetic construct
  source 1..17: note = 1A7[CD28]_H1.1_L1 vhCDR2
TISGSGDSTYYADSVKG

SEQ ID NO: 2634 - protein, 12 aa, synthetic construct
  source 1..12: note = 1A7[CD28]_H1.1_L1 vhCDR3
SGPGLRQVGFDY

SEQ ID NO: 2635 - protein, 107 aa, synthetic construct; identical to SEQ ID NO: 2452
  source 1..107: note = 1A7[CD28]_H1.1_L1 Variable Light (vl) Domain

SEQ ID NO: 2636 - protein, 11 aa, synthetic construct
  source 1..11: note = 1A7[CD28]_H1.1_L1 vlCDR1
RASQSISSYLN

SEQ ID NO: 2637 - protein, 7 aa, synthetic construct
  source 1..7: note = 1A7[CD28]_H1.1_L1 vlCDR2
AASSLQS

SEQ ID NO: 2638 - protein, 9 aa, synthetic construct
  source 1..9: note = 1A7[CD28]_H1.1_L1 vlCDR3
QQSYSTPFT

SEQ ID NO: 2639 - protein, 121 aa, synthetic construct; identical to SEQ ID NO: 2448
  source 1..121: note = 1A7[CD28]_H1_L1.71 Variable Heavy (vh) Domain

SEQ ID NO: 2640 - protein, 5 aa, synthetic construct
  source 1..5: note = 1A7[CD28]_H1_L1.71 vhCDR1
SYAMS

SEQ ID NO: 2641 - protein, 17 aa, synthetic construct
  source 1..17: note = 1A7[CD28]_H1_L1.71 vhCDR2
TISGSGDSTYYADSVKG

SEQ ID NO: 2642 - protein, 12 aa, synthetic construct
  source 1..12: note = 1A7[CD28]_H1_L1.71 vhCDR3
SGPGLRQVGFDY

SEQ ID NO: 2643 - protein, 107 aa, synthetic construct; identical to SEQ ID NO: 2595
  source 1..107: note = 1A7[CD28]_H1_L1.71 Variable Light (vl) Domain

SEQ ID NO: 2644 - protein, 11 aa, synthetic construct
  source 1..11: note = 1A7[CD28]_H1_L1.71 vlCDR1
RASQSISSYLN

SEQ ID NO: 2645 - protein, 7 aa, synthetic construct
  source 1..7: note = 1A7[CD28]_H1_L1.71 vlCDR2
AASSLQS

SEQ ID NO: 2646 - protein, 9 aa, synthetic construct
  source 1..9: note = 1A7[CD28]_H1_L1.71 vlCDR3
QQVYSTPFT

SEQ ID NO: 2647 - protein, 121 aa, synthetic construct; identical to SEQ ID NO: 2456
  source 1..121: note = 1A7[CD28]_H1.1_L1.71 Variable Heavy (vh) Domain

SEQ ID NO: 2648 - protein, 5 aa, synthetic construct
  source 1..5: note = 1A7[CD28]_H1.1_L1.71 vhCDR1
SYYMS

SEQ ID NO: 2649 - protein, 17 aa, synthetic construct
  source 1..17: note = 1A7[CD28]_H1.1_L1.71 vhCDR2
TISGSGDSTYYADSVKG

SEQ ID NO: 2650 - protein, 12 aa, synthetic construct
  source 1..12: note = 1A7[CD28]_H1.1_L1.71 vhCDR3
SGPGLRQVGFDY

SEQ ID NO: 2651 - protein, 107 aa, synthetic construct; identical to SEQ ID NO: 2595
  source 1..107: note = 1A7[CD28]_H1.1_L1.71 Variable Light (vl) Domain

SEQ ID NO: 2652 - protein, 11 aa, synthetic construct
  source 1..11: note = 1A7[CD28]_H1.1_L1.71 vlCDR1
RASQSISSYLN

SEQ ID NO: 2653 - protein, 7 aa, synthetic construct
  source 1..7: note = 1A7[CD28]_H1.1_L1.71 vlCDR2
AASSLQS

SEQ ID NO: 2654 - protein, 9 aa, synthetic construct
  source 1..9: note = 1A7[CD28]_H1.1_L1.71 vlCDR3
QQVYSTPFT

SEQ ID NO: 2655 - protein, 121 aa, synthetic construct; identical to SEQ ID NO: 2469
  source 1..121: note = 1A7[CD28]_H1.14_L1 Variable Heavy (vh) Domain

SEQ ID NO: 2656 - protein, 5 aa, synthetic construct
  source 1..5: note = 1A7[CD28]_H1.14_L1 vhCDR1
SYYMS

SEQ ID NO: 2657 - protein, 17 aa, synthetic construct
  source 1..17: note = 1A7[CD28]_H1.14_L1 vhCDR2
TISESGDSTYYADSVKG

SEQ ID NO: 2658 - protein, 12 aa, synthetic construct
  source 1..12: note = 1A7[CD28]_H1.14_L1 vhCDR3
SGPGLRQVGFDY

SEQ ID NO: 2659 - protein, 107 aa, synthetic construct; identical to SEQ ID NO: 2452
  source 1..107: note = 1A7[CD28]_H1.14_L1 Variable Light (vl) Domain

SEQ ID NO: 2660 - protein, 11 aa, synthetic construct
  source 1..11: note = 1A7[CD28]_H1.14_L1 vlCDR1
RASQSISSYLN

SEQ ID NO: 2661 - protein, 7 aa, synthetic construct
  source 1..7: note = 1A7[CD28]_H1.14_L1 vlCDR2
AASSLQS

SEQ ID NO: 2662 - protein, 9 aa, synthetic construct
  source 1..9: note = 1A7[CD28]_H1.14_L1 vlCDR3
QQSYSTPFT

SEQ ID NO: 2663 - protein, 121 aa, synthetic construct; identical to SEQ ID NO: 2469
  source 1..121: note = 1A7[CD28]_H1.14_L1.71 Variable Heavy (vh) Domain

SEQ ID NO: 2664 - protein, 5 aa, synthetic construct
  source 1..5: note = 1A7[CD28]_H1.14_L1.71 vhCDR1
SYYMS

SEQ ID NO: 2665 - protein, 17 aa, synthetic construct
  source 1..17: note = 1A7[CD28]_H1.14_L1.71 vhCDR2
TISESGDSTYYADSVKG

SEQ ID NO: 2666 - protein, 12 aa, synthetic construct
  source 1..12: note = 1A7[CD28]_H1.14_L1.71 vhCDR3
SGPGLRQVGFDY

SEQ ID NO: 2667 - protein, 107 aa, synthetic construct; identical to SEQ ID NO: 2595
  source 1..107: note = 1A7[CD28]_H1.14_L1.71 Variable Light (vl) Domain

SEQ ID NO: 2668 - protein, 11 aa, synthetic construct
  source 1..11: note = 1A7[CD28]_H1.14_L1.71 vlCDR1
RASQSISSYLN

SEQ ID NO: 2669 - protein, 7 aa, synthetic construct
  source 1..7: note = 1A7[CD28]_H1.14_L1.71 vlCDR2
AASSLQS

SEQ ID NO: 2670 - protein, 9 aa, synthetic construct
  source 1..9: note = 1A7[CD28]_H1.14_L1.71 vlCDR3
QQVYSTPFT

SEQ ID NO: 2671 - protein, 30 aa, synthetic construct
  source 1..30: note = 1A7 VH HFR1
  VARIANT 28: note = T, S or N
  VARIANT 29: note = F or L
  VARIANT 30: note = S, E, R, K, G, T, A or N
EVQLLESGGGLVQPGGSLRLSCAASGFXXX

SEQ ID NO: 2672 - protein, 14 aa, synthetic construct
  source 1..14: note = 1A7 VH HFR2
  VARIANT 14: note = S or A
WVRQAPGKGLEWVX

SEQ ID NO: 2673 - protein, 17 aa, synthetic construct
  source 1..17: note = 1A7 VH HCDR2
  VARIANT 1: note = T or S
  VARIANT 3: note = S, D, E, Y or T
  VARIANT 4: note = G, D, E, A, Y, S, N or T
  VARIANT 5: note = S, D, N or G
  VARIANT 6: note = D, T, Y, S or A
  VARIANT 7: note = D, T, Y, S or A
  VARIANT 8: note = S, Y, A, T, D or N
XIXXXXXXTYYADSVKG

SEQ ID NO: 2674 - protein, 32 aa, synthetic construct
  source 1..32: note = 1A7 VH HFR3
RFTISRDNSKNTLYLQMNSLRAEDTAVYYCAK

SEQ ID NO: 2675 - protein, 12 aa, synthetic construct
  source 1..12: note = 1A7 VH HCDR3
SGPGLRQVGFDY

SEQ ID NO: 2676 - protein, 11 aa, synthetic construct
  source 1..11: note = 1A7 VH HFR4
WGQGTLVTVSS

SEQ ID NO: 2677 - protein, 23 aa, synthetic construct
  source 1..23: note = 1A7 VL LFR1
DIQMTQSPSSLSASVGDRVTITC

SEQ ID NO: 2678 - protein, 11 aa, synthetic construct
  source 1..11: note = 1A7 VL LCDR1
  VARIANT 8: note = S, A, D, G, H, K, N, Q, T, V or Y
  VARIANT 9: note = Y, A, D, F, H, K, L, N, Q, S or W
  VARIANT 11: note = N, A, D, G, H, Q, S, T or Y
RASQSISXXLX

SEQ ID NO: 2679 - protein, 15 aa, synthetic construct
  source 1..15: note = 1A7 VL LFR2
WYQQKPGKAPKLLIY

SEQ ID NO: 2680 - protein, 32 aa, synthetic construct
  source 1..32: note = 1A7 VL LFR3
GVPSRFSGSGSGTDFTLTISSLQPEDFATYYC

SEQ ID NO: 2681 - protein, 9 aa, synthetic construct
  source 1..9: note = 1A7 VL LCDR3
  VARIANT 3: note = S, A, D, F, H, K, L, T, V or Y
  VARIANT 4: note = Y, A, D, F, H, K, L, Q, V or W
  VARIANT 5: note = S, A, D, G, H, K, N, Q, T, V or Y
  VARIANT 6: note = T, A, D, F, I, K, L, Q, S, V or Y
  VARIANT 8: note = F, I, L or W
QQXXXXPXT

SEQ ID NO: 2682 - protein, 10 aa, synthetic construct
  source 1..10: note = 1A7 VL LFR4
FGQGTKLEIK

SEQ ID NO: 2683 - protein, 449 aa, synthetic construct
  source 1..449: note = XENP41791 Chain 1 - 1B1-5.88488[CD28]_H1_IgG1_PVA_/S267K
EVQLVESGGGLVQPGGSLRLSCAASGFTFSSYWMHWVRQAPGKGLMWVSRINSDGSTASHADSVRGRFTISRDNAKNTLYLQLNGLRAEDTAVYYCARADSTTWYEFDFWGQGALVTVSSASTKGPSVFPLAPSSKSTSGGTAALGCLVKDYFPEPVTVSWNSGALTSGVHTFPAVLQSSGLYSLSSVVTVPSSSLGTQTYICNVNHKPSNTKVDKKVEPKSCDKTHTCPPCPAPPVAGPSVFLFPPKPKDTLMISRTPEVTCVVVDVKHEDPEVKFNWYVDGVEVHNAKTKPREEQYNSTYRVVSVLTVLHQDWLNGKEYKCKVSNKALPAPIEKTISKAKGQPREPQVYTLPPSREEMTKNQVSLTCLVKGFYPSDIAVEWESNGQPENNYKTTPPVLDSDGSFFLYSKLTVDKSRWQQGNVFSCSVMHEALHNHYTQKSLSLSPGK

SEQ ID NO: 2684 - protein, 214 aa, synthetic construct
  source 1..214: note = XENP41791 Chain 2 - 1B1-5.88488[CD28]_L1
EIVLTQSPATLSLSPGERATLSCRASQSVSSYLAWYQQKPGQAPRLLIYDASKRATGIPARFSGTGSGTDFTLTISSLEPEDFAVYSCQQRHNWPPTFGQGTKVEIKRTVAAPSVFIFPPSDEQLKSGTASVVCLLNNFYPREAKVQWKVDNALQSGNSQESVTEQDSKDSTYSLSSTLTLSKADYEKHKVYACEVTHQGLSSPVTKSFNRGEC

SEQ ID NO: 2685 - protein, 449 aa, synthetic construct; identical to SEQ ID NO: 2683
  source 1..449: note = XENP42418 Chain 1 - 1B1-5.88488[CD28]_H1_IgG1_PVA_/S267K

SEQ ID NO: 2686 - protein, 214 aa, synthetic construct
  source 1..214: note = XENP42418 Chain 2 - XPL1-6B1_L1
EIVLTQSPATLSLSPGERATLSCRASQSVSSYLAWYQQKPGQAPRLLIYDASNRATGIPARFSGSGSGTDFTLTISSLEPEDFAVYYCQQRSNWPPTFGQGTKVEIKRTVAAPSVFIFPPSDEQLKSGTASVVCLLNNFYPREAKVQWKVDNALQSGNSQESVTEQDSKDSTYSLSSTLTLSKADYEKHKVYACEVTHQGLSSPVTKSFNRGEC

SEQ ID NO: 2687 - protein, 454 aa, synthetic construct
  source 1..454: note = XENP41792 Chain 1 - 1B1-4.88488[CD28]_H1_IgG1_PVA_/S267K
EVQLVESGGGLVQPGGSLTLSCAASGFTVSSNFMSWFRQAPGKGLEWVSVIYSGGYTHYADSVKGRFTISRHKSKNTLFLQMNSLRSEDSAVYYCARHGISGTAGDYYYYGMDVWGQGTTVTVSSASTKGPSVFPLAPSSKSTSGGTAALGCLVKDYFPEPVTVSWNSGALTSGVHTFPAVLQSSGLYSLSSVVTVPSSSLGTQTYICNVNHKPSNTKVDKKVEPKSCDKTHTCPPCPAPPVAGPSVFLFPPKPKDTLMISRTPEVTCVVVDVKHEDPEVKFNWYVDGVEVHNAKTKPREEQYNSTYRVVSVLTVLHQDWLNGKEYKCKVSNKALPAPIEKTISKAKGQPREPQVYTLPPSREEMTKNQVSLTCLVKGFYPSDIAVEWESNGQPENNYKTTPPVLDSDGSFFLYSKLTVDKSRWQQGNVFSCSVMHEALHNHYTQKSLSLSPGK

SEQ ID NO: 2688 - protein, 214 aa, synthetic construct; identical to SEQ ID NO: 2684
  source 1..214: note = XENP41792 Chain 2 - 1B1-4.88488[CD28]_L1

SEQ ID NO: 2689 - protein, 454 aa, synthetic construct; identical to SEQ ID NO: 2687
  source 1..454: note = XENP42419 Chain 1 - 1B1-4.88488[CD28]_H1_IgG1_PVA_/S267K

SEQ ID NO: 2690 - protein, 214 aa, synthetic construct; identical to SEQ ID NO: 2686
  source 1..214: note = XENP42419 Chain 2 - XPL1-6B1_L1

SEQ ID NO: 2691 - protein, 449 aa, synthetic construct
  source 1..449: note = XENP41834 Chain 1 - 1D8.88474[CD28]_H1_IgG1_PVA_/S267K
EVQLVESGGGLVQPGGSLRLSCAASGFTLSGYWIHWVRQAPGKGLVWVSRINNDGSSTSHADSVRGRFTISRDSAKNTLYLHMNNLRAEDTAVYYCVRAYSSSWYRFDYWGQGTLVTVSSASTKGPSVFPLAPSSKSTSGGTAALGCLVKDYFPEPVTVSWNSGALTSGVHTFPAVLQSSGLYSLSSVVTVPSSSLGTQTYICNVNHKPSNTKVDKKVEPKSCDKTHTCPPCPAPPVAGPSVFLFPPKPKDTLMISRTPEVTCVVVDVKHEDPEVKFNWYVDGVEVHNAKTKPREEQYNSTYRVVSVLTVLHQDWLNGKEYKCKVSNKALPAPIEKTISKAKGQPREPQVYTLPPSREEMTKNQVSLTCLVKGFYPSDIAVEWESNGQPENNYKTTPPVLDSDGSFFLYSKLTVDKSRWQQGNVFSCSVMHEALHNHYTQKSLSLSPGK

SEQ ID NO: 2692 - protein, 214 aa, synthetic construct
  source 1..214: note = XENP41834 Chain 2 - 1D8.88474[CD28]_L1
EIVLTQSPATLSLSPGERATLSCRASQSVSSYLAWYQQKPGQAPRLLIYDASNRATGIPARFSGSGSGTDFTLTISSLEPEDFAVYYCQQRNNWPPTFGQGTKVEIKRTVAAPSVFIFPPSDEQLKSGTASVVCLLNNFYPREAKVQWKVDNALQSGNSQESVTEQDSKDSTYSLSSTLTLSKADYEKHKVYACEVTHQGLSSPVTKSFNRGEC

SEQ ID NO: 2693 - protein, 449 aa, synthetic construct; identical to SEQ ID NO: 2691
  source 1..449: note = XENP42420 Chain 1 - 1D8.88474[CD28]_H1_IgG1_PVA_/S267K

SEQ ID NO: 2694 - protein, 214 aa, synthetic construct; identical to SEQ ID NO: 2686
  source 1..214: note = XENP42420 Chain 2 - XPL1-6B1_L1

SEQ ID NO: 2695 - protein, 453 aa, synthetic construct
  source 1..453: note = XENP41846 Chain 1 - 1G2-2.88474[CD28]_H1_IgG1_PVA_/S267K
EVQLVESGGGLVQPGGSLRLSCAASGFTVRSNFMSWFRQVPGKGLEWVSVIYSGGSTHYADSVKGRFTISRHNSENTLFLQMNSLRTEDTAVYYCARHGISGTTSYYYYGMDVWGQGTTVTVSSASTKGPSVFPLAPSSKSTSGGTAALGCLVKDYFPEPVTVSWNSGALTSGVHTFPAVLQSSGLYSLSSVVTVPSSSLGTQTYICNVNHKPSNTKVDKKVEPKSCDKTHTCPPCPAPPVAGPSVFLFPPKPKDTLMISRTPEVTCVVVDVKHEDPEVKFNWYVDGVEVHNAKTKPREEQYNSTYRVVSVLTVLHQDWLNGKEYKCKVSNKALPAPIEKTISKAKGQPREPQVYTLPPSREEMTKNQVSLTCLVKGFYPSDIAVEWESNGQPENNYKTTPPVLDSDGSFFLYSKLTVDKSRWQQGNVFSCSVMHEALHNHYTQKSLSLSPGK

SEQ ID NO: 2696 - protein, 214 aa, synthetic construct
  source 1..214: note = XENP41846 Chain 2 - 1G2-2.88474[CD28]_L1
EIVLTQSPATLSLSPGERATLSCRASQSVSTYLAWYQQKPGQAPRLLIYDASNRATGIPARFSGSGSGTDFTLTISSLEPEDFAVYYCQQRSNWPPTFGQGTKVEIKRTVAAPSVFIFPPSDEQLKSGTASVVCLLNNFYPREAKVQWKVDNALQSGNSQESVTEQDSKDSTYSLSSTLTLSKADYEKHKVYACEVTHQGLSSPVTKSFNRGEC

SEQ ID NO: 2697 - protein, 453 aa, synthetic construct; identical to SEQ ID NO: 2695
  source 1..453: note = XENP42421 Chain 1 - 1G2-2.88474[CD28]_H1_IgG1_PVA_/S267K

SEQ ID NO: 2698 - protein, 214 aa, synthetic construct; identical to SEQ ID NO: 2686
  source 1..214: note = XENP42421 Chain 2 - XPL1-6B1_L1

SEQ ID NO: 2699 - protein, 447 aa, synthetic construct
  source 1..447: note = XENP41864 Chain 1 - 2G5.88497[CD28]_H1_IgG1_PVA_/S267K
EVQLVESGGDLVQPGGSLRLSCAASGFAFSSYWMHWVRQVPGKGLVWVSRINNDGSSASHADSVRGRFTISRDNARNTLHLQMNSLTAEDTAVYYCARGQQWFLLDYWGQGTLVTVSSASTKGPSVFPLAPSSKSTSGGTAALGCLVKDYFPEPVTVSWNSGALTSGVHTFPAVLQSSGLYSLSSVVTVPSSSLGTQTYICNVNHKPSNTKVDKKVEPKSCDKTHTCPPCPAPPVAGPSVFLFPPKPKDTLMISRTPEVTCVVVDVKHEDPEVKFNWYVDGVEVHNAKTKPREEQYNSTYRVVSVLTVLHQDWLNGKEYKCKVSNKALPAPIEKTISKAKGQPREPQVYTLPPSREEMTKNQVSLTCLVKGFYPSDIAVEWESNGQPENNYKTTPPVLDSDGSFFLYSKLTVDKSRWQQGNVFSCSVMHEALHNHYTQKSLSLSPGK

SEQ ID NO: 2700 - protein, 214 aa, synthetic construct
  source 1..214: note = XENP41864 Chain 2 - 2G5.88497[CD28]_L1
EIVLTQSPATLSLSPGERATLSCRASQSINSYLAWYQQKPGQAPRLLIYDASNRATGIPARFSGSGSGTDFTLTISSLEPEDFAVYYCQQSSNWPPTFGQGTKVEIKRTVAAPSVFIFPPSDEQLKSGTASVVCLLNNFYPREAKVQWKVDNALQSGNSQESVTEQDSKDSTYSLSSTLTLSKADYEKHKVYACEVTHQGLSSPVTKSFNRGEC

SEQ ID NO: 2701 - protein, 447 aa, synthetic construct; identical to SEQ ID NO: 2699
  source 1..447: note = XENP42423 Chain 1 - 2G5.88497[CD28]_H1_IgG1_PVA_/S267K

SEQ ID NO: 2702 - protein, 214 aa, synthetic construct; identical to SEQ ID NO: 2686
  source 1..214: note = XENP42423 Chain 2 - XPL1-6B1_L1

SEQ ID NO: 2703 - protein, 448 aa, synthetic construct
  source 1..448: note = XENP41882 Chain 1 - 2A3.88497[CD28]_H1_IgG1_PVA_/S267K
EVQLVESGGGLVKPGGSLRLSCAASGFTFSTYTMNWVRQAPGKGLEWVSSISTSSSHIYYADSVKGRFTISRDNAKNSLYLQMNSLRADDTAVYYCAREGNIVLTFDPWGQGTLVTVSSASTKGPSVFPLAPSSKSTSGGTAALGCLVKDYFPEPVTVSWNSGALTSGVHTFPAVLQSSGLYSLSSVVTVPSSSLGTQTYICNVNHKPSNTKVDKKVEPKSCDKTHTCPPCPAPPVAGPSVFLFPPKPKDTLMISRTPEVTCVVVDVKHEDPEVKFNWYVDGVEVHNAKTKPREEQYNSTYRVVSVLTVLHQDWLNGKEYKCKVSNKALPAPIEKTISKAKGQPREPQVYTLPPSREEMTKNQVSLTCLVKGFYPSDIAVEWESNGQPENNYKTTPPVLDSDGSFFLYSKLTVDKSRWQQGNVFSCSVMHEALHNHYTQKSLSLSPGK

SEQ ID NO: 2704 - protein, 214 aa, synthetic construct
  source 1..214: note = XENP41882 Chain 2 - 2A3.88497[CD28]_L1
EIVLTQSPATLSLSPGERATLSCRASQSVSSYLAWYQQKPGQAPRLLIYDASNRATGIPARFSGSGSGTDFTLTISSLEPEDFAVYYCQQRGYWPPTFGQGTKVEIKRTVAAPSVFIFPPSDEQLKSGTASVVCLLNNFYPREAKVQWKVDNALQSGNSQESVTEQDSKDSTYSLSSTLTLSKADYEKHKVYACEVTHQGLSSPVTKSFNRGEC

SEQ ID NO: 2705 - protein, 448 aa, synthetic construct; identical to SEQ ID NO: 2703
  source 1..448: note = XENP42425 Chain 1 - 2A3.88497[CD28]_H1_IgG1_PVA_/S267K

SEQ ID NO: 2706 - protein, 214 aa, synthetic construct; identical to SEQ ID NO: 2686
  source 1..214: note = XENP42425 Chain 2 - XPL1-6B1_L1

SEQ ID NO: 2707 - protein, 449 aa, synthetic construct
  source 1..449: note = XENP41907 Chain 1 - 1D9-3.83967[CD28]_H1_IgG1_PVA_/S267K
EVQLVESGGGLVQPGGSLRLSCAASGFTFSSYWMHWVRQAPGKGLVWVSRINSDGSSASHADSVRGRFTISRDNAKNTLYLQMNSLRAEDTAVYYCARAPSSSWYDFDYWGQGTLITVSSASTKGPSVFPLAPSSKSTSGGTAALGCLVKDYFPEPVTVSWNSGALTSGVHTFPAVLQSSGLYSLSSVVTVPSSSLGTQTYICNVNHKPSNTKVDKKVEPKSCDKTHTCPPCPAPPVAGPSVFLFPPKPKDTLMISRTPEVTCVVVDVKHEDPEVKFNWYVDGVEVHNAKTKPREEQYNSTYRVVSVLTVLHQDWLNGKEYKCKVSNKALPAPIEKTISKAKGQPREPQVYTLPPSREEMTKNQVSLTCLVKGFYPSDIAVEWESNGQPENNYKTTPPVLDSDGSFFLYSKLTVDKSRWQQGNVFSCSVMHEALHNHYTQKSLSLSPGK

SEQ ID NO: 2708 - protein, 214 aa, synthetic construct
  source 1..214: note = XENP41907 Chain 2 - 1D9-3.83967[CD28]_L1
EIVLTQSPATLSLSPGERATLSCRASQSVSRYLAWYQQKPGQAPRLLIYDASNRATGIPARFSGSGSGTDFTLTISSLEPEDFALYYCQQRSNWPPTFGQGTKVEIKRTVAAPSVFIFPPSDEQLKSGTASVVCLLNNFYPREAKVQWKVDNALQSGNSQESVTEQDSKDSTYSLSSTLTLSKADYEKHKVYACEVTHQGLSSPVTKSFNRGEC

SEQ ID NO: 2709 - protein, 449 aa, synthetic construct; identical to SEQ ID NO: 2707
  source 1..449: note = XENP42426 Chain 1 - 1D9-3.83967[CD28]_H1_IgG1_PVA_/S267K

SEQ ID NO: 2710 - protein, 214 aa, synthetic construct; identical to SEQ ID NO: 2686
  source 1..214: note = XENP42426 Chain 2 - XPL1-6B1_L1

SEQ ID NO: 2711 - protein, 452 aa, synthetic construct
  source 1..452: note = XENP41927 Chain 1 - 1C9-1.83967[CD28]_H1_IgG1_PVA_/S267K
EVQLVESGGGLVQPGGSLRLSCAASGFTFSSYSMHWVRQAPGKGLKYVSAISSDGNSIYYTNSVKGRFAISRDNSKNTLYLQMGSLRAEDMGVYYCAGGVAAGHYFYSGMDVWGQGTTVTVSSASTKGPSVFPLAPSSKSTSGGTAALGCLVKDYFPEPVTVSWNSGALTSGVHTFPAVLQSSGLYSLSSVVTVPSSSLGTQTYICNVNHKPSNTKVDKKVEPKSCDKTHTCPPCPAPPVAGPSVFLFPPKPKDTLMISRTPEVTCVVVDVKHEDPEVKFNWYVDGVEVHNAKTKPREEQYNSTYRVVSVLTVLHQDWLNGKEYKCKVSNKALPAPIEKTISKAKGQPREPQVYTLPPSREEMTKNQVSLTCLVKGFYPSDIAVEWESNGQPENNYKTTPPVLDSDGSFFLYSKLTVDKSRWQQGNVFSCSVMHEALHNHYTQKSLSLSPGK

SEQ ID NO: 2712 - protein, 214 aa, synthetic construct
  source 1..214: note = XENP41927 Chain 2 - 1C9-1.83967[CD28]_L1
EIVLTQSPATLSLSPGERATLSCGASQSVSSSLAWYQQKPGQAPRLLIYDSSNRATGIPARFSGRGSGTDFTLTISSLEPEDFAVYYCQQRGNWPPTFGQGTKVEIKRTVAAPSVFIFPPSDEQLKSGTASVVCLLNNFYPREAKVQWKVDNALQSGNSQESVTEQDSKDSTYSLSSTLTLSKADYEKHKVYACEVTHQGLSSPVTKSFNRGEC

SEQ ID NO: 2713 - protein, 452 aa, synthetic construct; identical to SEQ ID NO: 2711
  source 1..452: note = XENP42429 Chain 1 - 1C9-1.83967[CD28]_H1_IgG1_PVA_/S267K

SEQ ID NO: 2714 - protein, 214 aa, synthetic construct; identical to SEQ ID NO: 2686
  source 1..214: note = XENP42429 Chain 2 - XPL1-6B1_L1

SEQ ID NO: 2715 - protein, 449 aa, synthetic construct
  source 1..449: note = XENP41936 Chain 1 - 1D10-4.83967[CD28]_H1_IgG1_PVA_/S267K
EVQLVESGGGLVQPGGSLRLSCAASGFTFSDYWMHWVRQPPGKGLMWVSRINSDGSTASHADSVRDRFSISRDNAKNTLYLQLNGLRAEDTAVYYCARADNTTWYEFDFWGQGALVTVSSASTKGPSVFPLAPSSKSTSGGTAALGCLVKDYFPEPVTVSWNSGALTSGVHTFPAVLQSSGLYSLSSVVTVPSSSLGTQTYICNVNHKPSNTKVDKKVEPKSCDKTHTCPPCPAPPVAGPSVFLFPPKPKDTLMISRTPEVTCVVVDVKHEDPEVKFNWYVDGVEVHNAKTKPREEQYNSTYRVVSVLTVLHQDWLNGKEYKCKVSNKALPAPIEKTISKAKGQPREPQVYTLPPSREEMTKNQVSLTCLVKGFYPSDIAVEWESNGQPENNYKTTPPVLDSDGSFFLYSKLTVDKSRWQQGNVFSCSVMHEALHNHYTQKSLSLSPGK

SEQ ID NO: 2716 - protein, 214 aa, synthetic construct
  source 1..214: note = XENP41936 Chain 2 - 1D10-4.83967[CD28]_L1
EIVLTQSPATLSLSPGERATLSCRASQSISIYLAWYQQKPGQAPRLLIFDASKRATGIPARFSGSGSGTDFTLTISSLEPEDFAVYSCQQRHNWPPTFGQGTKVEIKRTVAAPSVFIFPPSDEQLKSGTASVVCLLNNFYPREAKVQWKVDNALQSGNSQESVTEQDSKDSTYSLSSTLTLSKADYEKHKVYACEVTHQGLSSPVTKSFNRGEC

SEQ ID NO: 2717 - protein, 449 aa, synthetic construct; identical to SEQ ID NO: 2715
  source 1..449: note = XENP42430 Chain 1 - 1D10-4.83967[CD28]_H1_IgG1_PVA_/S267K

SEQ ID NO: 2718 - protein, 214 aa, synthetic construct; identical to SEQ ID NO: 2686
  source 1..214: note = XENP42430 Chain 2 - XPL1-6B1_L1

SEQ ID NO: 2719 - protein, 453 aa, synthetic construct
  source 1..453: note = XENP41957 Chain 1 - 1A12.83967[CD28]_H1
EVQLVESGGGVVQPGGSLRLSCAASGFTFDDYAMHWVRQGPGKGLEWVSLINGDGDNTYYADSVKGRFTISRDNSKNSLYLQMNSLRTEDTALYFCAKDPLKAVSYYYYGMDVWGQGTTVTVSSASTKGPSVFPLAPSSKSTSGGTAALGCLVKDYFPEPVTVSWNSGALTSGVHTFPAVLQSSGLYSLSSVVTVPSSSLGTQTYICNVNHKPSNTKVDKKVEPKSCDKTHTCPPCPAPPVAGPSVFLFPPKPKDTLMISRTPEVTCVVVDVKHEDPEVKFNWYVDGVEVHNAKTKPREEQYNSTYRVVSVLTVLHQDWLNGKEYKCKVSNKALPAPIEKTISKAKGQPREPQVYTLPPSREEMTKNQVSLTCLVKGFYPSDIAVEWESNGQPENNYKTTPPVLDSDGSFFLYSKLTVDKSRWQQGNVFSCSVMHEALHNHYTQKSLSLSPGK

SEQ ID NO: 2720 - protein, 214 aa, synthetic construct
  source 1..214: note = XENP41957 Chain 2 - 1A12.83967[CD28]_L1
EIVLTQSPATLSFSPGERATLSCRASQTITNYLAWYQQKPGQAPRLLIYDASNRATGIPARFSGRGSGTDFTLTISGLEPEDFAVYYCQQRSSWPPTFGQGTKVEIKRTVAAPSVFIFPPSDEQLKSGTASVVCLLNNFYPREAKVQWKVDNALQSGNSQESVTEQDSKDSTYSLSSTLTLSKADYEKHKVYACEVTHQGLSSPVTKSFNRGEC

SEQ ID NO: 2721 - protein, 454 aa, synthetic construct
  source 1..454: note = XENP41949 Chain 1 - 1B11.83967[CD28]_H1
EVQLVESGGGLVQPGGSLRLSCAASGFTVSSNFMSWFRQAPGKGLEWVSVIYSGGSTYYADSVKGRFTISRHNSKNTLYLQMNSLRSEDTAVYYCARHGITGTTGDYYYYGMDVWGQGTTVTVSSASTKGPSVFPLAPSSKSTSGGTAALGCLVKDYFPEPVTVSWNSGALTSGVHTFPAVLQSSGLYSLSSVVTVPSSSLGTQTYICNVNHKPSNTKVDKKVEPKSCDKTHTCPPCPAPPVAGPSVFLFPPKPKDTLMISRTPEVTCVVVDVKHEDPEVKFNWYVDGVEVHNAKTKPREEQYNSTYRVVSVLTVLHQDWLNGKEYKCKVSNKALPAPIEKTISKAKGQPREPQVYTLPPSREEMTKNQVSLTCLVKGFYPSDIAVEWESNGQPENNYKTTPPVLDSDGSFFLYSKLTVDKSRWQQGNVFSCSVMHEALHNHYTQKSLSLSPGK

SEQ ID NO: 2722 - protein, 214 aa, synthetic construct
  source 1..214: note = XENP41949 Chain 2 - 1B11.83967[CD28]_L1
EIVLTQSPATLSLSPGERATLSCRASQSVRSYLAWYQQKPGQAPRLLIYDASNRATGIPARFSGSGSGTDFTLTISSLEPEDFAVYYCQQRSNWPPTFGQGTKVEIKRTVAAPSVFIFPPSDEQLKSGTASVVCLLNNFYPREAKVQWKVDNALQSGNSQESVTEQDSKDSTYSLSSTLTLSKADYEKHKVYACEVTHQGLSSPVTKSFNRGEC

SEQ ID NO: 2723 - protein, 449 aa, synthetic construct
  source 1..449: note = XENP41935 Chain 1 - 1D10-2.83967[CD28]_H1
EVQLVESGGGLVQPGGSLRLSCAASGFTFSDYWMHWVRQPPGKGLMWVSRINSDGSTASHADSVRDRFSISRDNAKNTLYLQLNGLRAEDTAVYYCARADSTTWYEFDFWGQGALVTVSSASTKGPSVFPLAPSSKSTSGGTAALGCLVKDYFPEPVTVSWNSGALTSGVHTFPAVLQSSGLYSLSSVVTVPSSSLGTQTYICNVNHKPSNTKVDKKVEPKSCDKTHTCPPCPAPPVAGPSVFLFPPKPKDTLMISRTPEVTCVVVDVKHEDPEVKFNWYVDGVEVHNAKTKPREEQYNSTYRVVSVLTVLHQDWLNGKEYKCKVSNKALPAPIEKTISKAKGQPREPQVYTLPPSREEMTKNQVSLTCLVKGFYPSDIAVEWESNGQPENNYKTTPPVLDSDGSFFLYSKLTVDKSRWQQGNVFSCSVMHEALHNHYTQKSLSLSPGK

SEQ ID NO: 2724 - protein, 214 aa, synthetic construct; identical to SEQ ID NO: 2716
  source 1..214: note = XENP41935 Chain 2 - 1D10-2.83967[CD28]_L1

SEQ ID NO: 2725 - protein, 449 aa, synthetic construct
  source 1..449: note = XENP41904 Chain 1 - 1D7.83967[CD28]_H1
EVQLVESGGGLVQPGGSLRLSCAASGFTFSSYWMHWVRQAPGKGLMWVSRINSDGSSASHAESVRGRFTISRDNAKNTLYLQLNGLRAEDTAVYYCARADSSTWYEFDFWGQGALVTVSSASTKGPSVFPLAPSSKSTSGGTAALGCLVKDYFPEPVTVSWNSGALTSGVHTFPAVLQSSGLYSLSSVVTVPSSSLGTQTYICNVNHKPSNTKVDKKVEPKSCDKTHTCPPCPAPPVAGPSVFLFPPKPKDTLMISRTPEVTCVVVDVKHEDPEVKFNWYVDGVEVHNAKTKPREEQYNSTYRVVSVLTVLHQDWLNGKEYKCKVSNKALPAPIEKTISKAKGQPREPQVYTLPPSREEMTKNQVSLTCLVKGFYPSDIAVEWESNGQPENNYKTTPPVLDSDGSFFLYSKLTVDKSRWQQGNVFSCSVMHEALHNHYTQKSLSLSPGK

SEQ ID NO: 2726 - protein, 214 aa, synthetic construct
  source 1..214: note = XENP41904 Chain 2 - 1D7.83967[CD28]_L1
EIVLTQSPATLSLSPGERATLSCRASQSVSSYLAWYQQKPGQAPRLLIYDASKRATGIPARFSGSGSGTDFTLTISSLEPEDFAVYYCQQRNNWPPTFGQGTKVEIKRTVAAPSVFIFPPSDEQLKSGTASVVCLLNNFYPREAKVQWKVDNALQSGNSQESVTEQDSKDSTYSLSSTLTLSKADYEKHKVYACEVTHQGLSSPVTKSFNRGEC

SEQ ID NO: 2727 - protein, 450 aa, synthetic construct
  source 1..450: note = XENP41901 Chain 1 - 1D3.83967[CD28]_H1
QVQLQESGPGLVKPSQTLSLTCTVSGGSISSGGYYWSWIRQHPGKGLEWIGFIYYSWSTSYNPSLKSRLTMSLDTSKNQFSLKLSSVTAADTAVYYCAREANVNDAAFDIWGPGTMVTVSSASTKGPSVFPLAPSSKSTSGGTAALGCLVKDYFPEPVTVSWNSGALTSGVHTFPAVLQSSGLYSLSSVVTVPSSSLGTQTYICNVNHKPSNTKVDKKVEPKSCDKTHTCPPCPAPPVAGPSVFLFPPKPKDTLMISRTPEVTCVVVDVKHEDPEVKFNWYVDGVEVHNAKTKPREEQYNSTYRVVSVLTVLHQDWLNGKEYKCKVSNKALPAPIEKTISKAKGQPREPQVYTLPPSREEMTKNQVSLTCLVKGFYPSDIAVEWESNGQPENNYKTTPPVLDSDGSFFLYSKLTVDKSRWQQGNVFSCSVMHEALHNHYTQKSLSLSPGK

SEQ ID NO: 2728 - protein, 214 aa, synthetic construct; identical to SEQ ID NO: 2686
  source 1..214: note = XENP41901 Chain 2 - 1D3.83967[CD28]_L1

SEQ ID NO: 2729 - protein, 448 aa, synthetic construct
  source 1..448: note = XENP41891 Chain 1 - 2B10.88497[CD28]_H1
EVQLVESGGGLVKPGGSLRLSCAASGFTFSSYTMNWVRQAPGKGLEWVSSISSSSSHKYYSDSVKGRFTISRDNAKNSLYLQMNSLRAEDTAEYYCAREGDIVLIFDPWGQGTLVTVSSASTKGPSVFPLAPSSKSTSGGTAALGCLVKDYFPEPVTVSWNSGALTSGVHTFPAVLQSSGLYSLSSVVTVPSSSLGTQTYICNVNHKPSNTKVDKKVEPKSCDKTHTCPPCPAPPVAGPSVFLFPPKPKDTLMISRTPEVTCVVVDVKHEDPEVKFNWYVDGVEVHNAKTKPREEQYNSTYRVVSVLTVLHQDWLNGKEYKCKVSNKALPAPIEKTISKAKGQPREPQVYTLPPSREEMTKNQVSLTCLVKGFYPSDIAVEWESNGQPENNYKTTPPVLDSDGSFFLYSKLTVDKSRWQQGNVFSCSVMHEALHNHYTQKSLSLSPGK

SEQ ID NO: 2730 - protein, 214 aa, synthetic construct
  source 1..214: note = XENP41891 Chain 2 - 2B10.88497[CD28]_L1
EIVLTQSPATLSLSPGERATLSCRASQSVSSYLAWYQQNPGQVPRLLIYDASNRATGIPVRFSGSGSGTDFTLTISSLEPEDFAVYYCQQRGNWPPTFGQGTKVEIKRTVAAPSVFIFPPSDEQLKSGTASVVCLLNNFYPREAKVQWKVDNALQSGNSQESVTEQDSKDSTYSLSSTLTLSKADYEKHKVYACEVTHQGLSSPVTKSFNRGEC

SEQ ID NO: 2731 - protein, 448 aa, synthetic construct
  source 1..448: note = XENP41890 Chain 1 - 2B9.88497[CD28]_H1
EVQLVESGGGLVKPGGSLRLSCAASGFTFSSYTMNWVRQAPGKGLEWVSSISSSNTYIYYIDSVKGRFTISRDNAKNSLYLQMNSLRAEDTAEYYCVREGDIVLTFDPWGQGTLVTVSSASTKGPSVFPLAPSSKSTSGGTAALGCLVKDYFPEPVTVSWNSGALTSGVHTFPAVLQSSGLYSLSSVVTVPSSSLGTQTYICNVNHKPSNTKVDKKVEPKSCDKTHTCPPCPAPPVAGPSVFLFPPKPKDTLMISRTPEVTCVVVDVKHEDPEVKFNWYVDGVEVHNAKTKPREEQYNSTYRVVSVLTVLHQDWLNGKEYKCKVSNKALPAPIEKTISKAKGQPREPQVYTLPPSREEMTKNQVSLTCLVKGFYPSDIAVEWESNGQPENNYKTTPPVLDSDGSFFLYSKLTVDKSRWQQGNVFSCSVMHEALHNHYTQKSLSLSPGK

SEQ ID NO: 2732 - protein, 214 aa, synthetic construct
  source 1..214: note = XENP41890 Chain 2 - 2B9.88497[CD28]_L1
EIVLTQSPATLSLSPGERATLSCRASQSVSSYLAWFQQKPGQAPRLLIYDASNRATGIPARFSGSGSGTDFTLTISSLEPEDFAVYYCQQRGSWPPTFGQGTKVEIKRTVAAPSVFIFPPSDEQLKSGTASVVCLLNNFYPREAKVQWKVDNALQSGNSQESVTEQDSKDSTYSLSSTLTLSKADYEKHKVYACEVTHQGLSSPVTKSFNRGEC

SEQ ID NO: 2733 - protein, 449 aa, synthetic construct
  source 1..449: note = XENP41889 Chain 1 - 2B8.88497[CD28]_H1
EVQLVETGGGLVQPGESLRLSCAASGFSFSSNWMHWVRQAPGKGLVWISRINSDGSSASSADSVRGRFTISRDNAKNTLYLQMNSLRAEDTAVYYCARSDSSSWYEFEYWGQGTLVTVSSASTKGPSVFPLAPSSKSTSGGTAALGCLVKDYFPEPVTVSWNSGALTSGVHTFPAVLQSSGLYSLSSVVTVPSSSLGTQTYICNVNHKPSNTKVDKKVEPKSCDKTHTCPPCPAPPVAGPSVFLFPPKPKDTLMISRTPEVTCVVVDVKHEDPEVKFNWYVDGVEVHNAKTKPREEQYNSTYRVVSVLTVLHQDWLNGKEYKCKVSNKALPAPIEKTISKAKGQPREPQVYTLPPSREEMTKNQVSLTCLVKGFYPSDIAVEWESNGQPENNYKTTPPVLDSDGSFFLYSKLTVDKSRWQQGNVFSCSVMHEALHNHYTQKSLSLSPGK

SEQ ID NO: 2734 - protein, 214 aa, synthetic construct
  source 1..214: note = XENP41889 Chain 2 - 2B8.88497[CD28]_L1
EIVLTQSPATLSLSPGERATLSCRASQSVSNYLAWYQQKPGQAPRLLIYDTSNRATGIPARFSGSGSGTDFTLTISSLEPEDFAVYYCQQRGNWPPTFGQGTKVEIKRTVAAPSVFIFPPSDEQLKSGTASVVCLLNNFYPREAKVQWKVDNALQSGNSQESVTEQDSKDSTYSLSSTLTLSKADYEKHKVYACEVTHQGLSSPVTKSFNRGEC

SEQ ID NO: 2735 - protein, 449 aa, synthetic construct
  source 1..449: note = XENP41877 Chain 1 - 1G6-1.83967[CD28]_H1
EVQLVESGGGLVQPGGSLRLSCAASGFTFSSYWMHWVRQAPGKGLVWVSRINSDGSSASHADSVKGRFTISRDNAKNTLYLQVNGLRAEDTAVYYCARADSSSWYEFDFWGQGTLVTVSSASTKGPSVFPLAPSSKSTSGGTAALGCLVKDYFPEPVTVSWNSGALTSGVHTFPAVLQSSGLYSLSSVVTVPSSSLGTQTYICNVNHKPSNTKVDKKVEPKSCDKTHTCPPCPAPPVAGPSVFLFPPKPKDTLMISRTPEVTCVVVDVKHEDPEVKFNWYVDGVEVHNAKTKPREEQYNSTYRVVSVLTVLHQDWLNGKEYKCKVSNKALPAPIEKTISKAKGQPREPQVYTLPPSREEMTKNQVSLTCLVKGFYPSDIAVEWESNGQPENNYKTTPPVLDSDGSFFLYSKLTVDKSRWQQGNVFSCSVMHEALHNHYTQKSLSLSPGK

SEQ ID NO: 2736 - protein, 214 aa, synthetic construct; identical to SEQ ID NO: 2692
  source 1..214: note = XENP41877 Chain 2 - 1G6-1.83967[CD28]_L1

SEQ ID NO: 2737 - protein, 449 aa, synthetic construct
  source 1..449: note = XENP41874 Chain 1 - 1C7.88474[CD28]_H1
EVQLVESGGGLVQPGGSLRLSCAASGFTFSTYWMHWVRQTPGKGLVWVSRINSDGSSASFADSVRGRFTISRDNAKNTLYLYMNSLRAEDTAIYYCARADSSTWSHFDYWGQGTLVTVSSASTKGPSVFPLAPSSKSTSGGTAALGCLVKDYFPEPVTVSWNSGALTSGVHTFPAVLQSSGLYSLSSVVTVPSSSLGTQTYICNVNHKPSNTKVDKKVEPKSCDKTHTCPPCPAPPVAGPSVFLFPPKPKDTLMISRTPEVTCVVVDVKHEDPEVKFNWYVDGVEVHNAKTKPREEQYNSTYRVVSVLTVLHQDWLNGKEYKCKVSNKALPAPIEKTISKAKGQPREPQVYTLPPSREEMTKNQVSLTCLVKGFYPSDIAVEWESNGQPENNYKTTPPVLDSDGSFFLYSKLTVDKSRWQQGNVFSCSVMHEALHNHYTQKSLSLSPGK

SEQ ID NO: 2738 - protein, 214 aa, synthetic construct
  source 1..214: note = XENP41874 Chain 2 - 1C7.88474[CD28]_L1
EIVLTQSPATLSLSPGEGATLSCRASQSVSSYLAWFQQKRGQAPRLLIYDASNRATGIPARFSGSGSGTDFTLTISSLEPEDFAVYYCQQRSNWPPTFGQGTKVEIKRTVAAPSVFIFPPSDEQLKSGTASVVCLLNNFYPREAKVQWKVDNALQSGNSQESVTEQDSKDSTYSLSSTLTLSKADYEKHKVYACEVTHQGLSSPVTKSFNRGEC

SEQ ID NO: 2739 - protein, 453 aa, synthetic construct
  source 1..453: note = XENP41869 Chain 1 - 1A5-2.88474[CD28]_H1
EVHLVESGGDLVQPGGSLRLSCAASGFTVSSNFMSWFRQAPGKGLEWVSVIYSGGSTNYADSVKGRFTISRHNSKNTLYLQMNSLRVEDTAVYYCARHGIAGTTPYFYYGMDVWGQGTTVTVSSASTKGPSVFPLAPSSKSTSGGTAALGCLVKDYFPEPVTVSWNSGALTSGVHTFPAVLQSSGLYSLSSVVTVPSSSLGTQTYICNVNHKPSNTKVDKKVEPKSCDKTHTCPPCPAPPVAGPSVFLFPPKPKDTLMISRTPEVTCVVVDVKHEDPEVKFNWYVDGVEVHNAKTKPREEQYNSTYRVVSVLTVLHQDWLNGKEYKCKVSNKALPAPIEKTISKAKGQPREPQVYTLPPSREEMTKNQVSLTCLVKGFYPSDIAVEWESNGQPENNYKTTPPVLDSDGSFFLYSKLTVDKSRWQQGNVFSCSVMHEALHNHYTQKSLSLSPGK

SEQ ID NO: 2740 - protein, 214 aa, synthetic construct
  source 1..214: note = XENP41869 Chain 2 - 1A5-2.88474[CD28]_L1
EIVLTQSPATLSLSPGEGATLSCRASQSVSNYLAWYQQKPGQAPRLLIYDASNRATGIPARFSGSGSGTDFTLTISSLEPEDFVVYYCQQRSNWPPTFGQGTKVEIKRTVAAPSVFIFPPSDEQLKSGTASVVCLLNNFYPREAKVQWKVDNALQSGNSQESVTEQDSKDSTYSLSSTLTLSKADYEKHKVYACEVTHQGLSSPVTKSFNRGEC

SEQ ID NO: 2741 - protein, 451 aa, synthetic construct
  source 1..451: note = XENP41868 Chain 1 - 1A2.88474[CD28]_H1
EVQLVESGGGLVQPGGSLRLSCAASGFTFSNFWMHWVRQAPGKGLVWVSRINSDGSSASFADSVKGRFTISRDNAKNTLYLQMNSLRAEDTAVYYCARDRYSGSFYNWFDPWGQGTLVTVSSASTKGPSVFPLAPSSKSTSGGTAALGCLVKDYFPEPVTVSWNSGALTSGVHTFPAVLQSSGLYSLSSVVTVPSSSLGTQTYICNVNHKPSNTKVDKKVEPKSCDKTHTCPPCPAPPVAGPSVFLFPPKPKDTLMISRTPEVTCVVVDVKHEDPEVKFNWYVDGVEVHNAKTKPREEQYNSTYRVVSVLTVLHQDWLNGKEYKCKVSNKALPAPIEKTISKAKGQPREPQVYTLPPSREEMTKNQVSLTCLVKGFYPSDIAVEWESNGQPENNYKTTPPVLDSDGSFFLYSKLTVDKSRWQQGNVFSCSVMHEALHNHYTQKSLSLSPGK

SEQ ID NO: 2742 - protein, 214 aa, synthetic construct; identical to SEQ ID NO: 2686
  source 1..214: note = XENP41868 Chain 2 - 1A2.88474[CD28]_L1

SEQ ID NO: 2743 - protein, 449 aa, synthetic construct
  source 1..449: note = XENP41860 Chain 1 - 2F5.88497[CD28]_H1
EVQLVESGGGLVQPGGSLRLSCAASGFTFSSYWIHWVRQTPGKGLVWVSRINSDGSSASHADSVRGRFTISRHNAKNTLYLQMNSLRAEDTAVYYCTRSDSSTWYKFDYWGQGTLVTVSSASTKGPSVFPLAPSSKSTSGGTAALGCLVKDYFPEPVTVSWNSGALTSGVHTFPAVLQSSGLYSLSSVVTVPSSSLGTQTYICNVNHKPSNTKVDKKVEPKSCDKTHTCPPCPAPPVAGPSVFLFPPKPKDTLMISRTPEVTCVVVDVKHEDPEVKFNWYVDGVEVHNAKTKPREEQYNSTYRVVSVLTVLHQDWLNGKEYKCKVSNKALPAPIEKTISKAKGQPREPQVYTLPPSREEMTKNQVSLTCLVKGFYPSDIAVEWESNGQPENNYKTTPPVLDSDGSFFLYSKLTVDKSRWQQGNVFSCSVMHEALHNHYTQKSLSLSPGK

SEQ ID NO: 2744 - protein, 214 aa, synthetic construct; identical to SEQ ID NO: 2686
  source 1..214: note = XENP41860 Chain 2 - 2F5.88497[CD28]_L1

SEQ ID NO: 2745 - protein, 454 aa, synthetic construct
  source 1..454: note = XENP41858 Chain 1 - 2E9.88497[CD28]_H1
EVQLVEYGGGLVQPGGSLRLSCAASGFTVSSSYMSWVRQAPGKGLEWVSVIYSGGYTYYADSVKGRFIISRDNSKNTLYLQMNSLSAEDTAVYHCSRHGITGTAGYYHYYGMDVWGQGTTVTVSSASTKGPSVFPLAPSSKSTSGGTAALGCLVKDYFPEPVTVSWNSGALTSGVHTFPAVLQSSGLYSLSSVVTVPSSSLGTQTYICNVNHKPSNTKVDKKVEPKSCDKTHTCPPCPAPPVAGPSVFLFPPKPKDTLMISRTPEVTCVVVDVKHEDPEVKFNWYVDGVEVHNAKTKPREEQYNSTYRVVSVLTVLHQDWLNGKEYKCKVSNKALPAPIEKTISKAKGQPREPQVYTLPPSREEMTKNQVSLTCLVKGFYPSDIAVEWESNGQPENNYKTTPPVLDSDGSFFLYSKLTVDKSRWQQGNVFSCSVMHEALHNHYTQKSLSLSPGK

SEQ ID NO: 2746 - protein, 214 aa, synthetic construct
  source 1..214: note = XENP41858 Chain 2 - 2E9.88497[CD28]_L1
EIVLTQSPATLSLSPGERATLSCRASQSVSSYLAWYQQRPGQAPRLLIYEGSNRATGIPARFSGSGSGTDFTLTISSLEPEDFAVYYCQQRSNWPPTFGQGTKVEIKRTVAAPSVFIFPPSDEQLKSGTASVVCLLNNFYPREAKVQWKVDNALQSGNSQESVTEQDSKDSTYSLSSTLTLSKADYEKHKVYACEVTHQGLSSPVTKSFNRGEC

SEQ ID NO: 2747 - protein, 449 aa, synthetic construct
  source 1..449: note = XENP41849 Chain 1 - 1A3.88474[CD28]_H1
EVQLVESGGGLVQPGGSLRLSCAAFGFTFSNYWMHWVRQAPGKGLVWVSRINSDGSSASFADSVRGRFTISRDNAKNTLYLQLNSLRAEDTAVYYCARADSSSWYLFDNWGQGTLVTVSSASTKGPSVFPLAPSSKSTSGGTAALGCLVKDYFPEPVTVSWNSGALTSGVHTFPAVLQSSGLYSLSSVVTVPSSSLGTQTYICNVNHKPSNTKVDKKVEPKSCDKTHTCPPCPAPPVAGPSVFLFPPKPKDTLMISRTPEVTCVVVDVKHEDPEVKFNWYVDGVEVHNAKTKPREEQYNSTYRVVSVLTVLHQDWLNGKEYKCKVSNKALPAPIEKTISKAKGQPREPQVYTLPPSREEMTKNQVSLTCLVKGFYPSDIAVEWESNGQPENNYKTTPPVLDSDGSFFLYSKLTVDKSRWQQGNVFSCSVMHEALHNHYTQKSLSLSPGK

SEQ ID NO: 2748 - protein, 214 aa, synthetic construct; identical to SEQ ID NO: 2686
  source 1..214: note = XENP41849 Chain 2 - 1A3.88474[CD28]_L1

SEQ ID NO: 2749 - protein, 120 aa, synthetic construct
  source 1..120: note = 1A3.88474[CD28]_H1.1
EVQLVESGGGLVQPGGSLRLSCAASGFTFSNYWMHWVRQAPGKGLVWVSRIRSDGSSASFADSVRGRFTISRDNAKNTLYLQLNSLRAEDTAVYYCARADSSSWYLFDNWGQGTLVTVSS

SEQ ID NO: 2750 - protein, 120 aa, synthetic construct
  source 1..120: note = 1A3.88474[CD28]_H1.2
EVQLVESGGGLVQPGGSLRLSCAASGFTQSNYWMHWVRQAPGKGLVWVSRINSDGSTASFADSVRGRFTISRDNAKNTLYLQLNSLRAEDTAVYYCARSDSSSWYLFDSWGQGTLVTVSS

SEQ ID NO: 2751 - protein, 120 aa, synthetic construct
  source 1..120: note = 1A3.88474[CD28]_H1.3
EVQLVESGGGLVQPGGSLRLSCAASGFTTSNYWMHWVRQAPGKGLVWVSRINKDGSSASFADSVRGRFTISRDNAKNTLYLQLNSLRAEDTAVYYCARSDSSSWYLFDNWGQGTLVTVSS

SEQ ID NO: 2752 - protein, 120 aa, synthetic construct
  source 1..120: note = 1A3.88474[CD28]_H1.4
EVQLVESGGGLVQPGGSLRLSCAASGFTFSNYWMHWVRQAPGKGLVWVSRISSDGSSASFADSVRGRFTISRDNAKNTLYLQLNSLRAEDTAVYYCARADSSSWYRFDNWGQGTLVTVSS

SEQ ID NO: 2753 - protein, 120 aa, synthetic construct
  source 1..120: note = 1A3.88474[CD28]_H1.5
EVQLVESGGGLVQPGGSLRLSCAASGFTQSNYWMHWVRQAPGKGLVWVSRINNDGSSASFADSVRGRFTISRDNAKNTLYLQLNSLRAEDTAVYYCARADSSSWYLFDNWGQGTLVTVSS

SEQ ID NO: 2754 - protein, 120 aa, synthetic construct
  source 1..120: note = 1A3.88474[CD28]_H1.6
EVQLVESGGGLVQPGGSLRLSCAASGFTFSNEWMHWVRQAPGKGLVWVSRINSDGSSASFADSVRGRFTISRDNAKNTLYLQLNSLRAEDTAVYYCARADSSSWYLFDNWGQGTLVTVSS

SEQ ID NO: 2755 - protein, 120 aa, synthetic construct
  source 1..120: note = 1A3.88474[CD28]_H1.7
EVQLVESGGGLVQPGGSLRLSCAASGFTGSNYWMHWVRQAPGKGLVWVSRINGDGSSASFADSVRGRFTISRDNAKNTLYLQLNSLRAEDTAVYYCARADSSSWYLFDNWGQGTLVTVSS

SEQ ID NO: 2756 - protein, 120 aa, synthetic construct
  source 1..120: note = 1A3.88474[CD28]_H1.8
EVQLVESGGGLVQPGGSLRLSCAASGFTSGNYWMHWVRQAPGKGLVWVSRINSDGSSASFADSVRGRFTISRDNAKNTLYLQLNSLRAEDTAVYYCARADSSSWYLFDNWGQGTLVTVSS

SEQ ID NO: 2757 - protein, 120 aa, synthetic construct
  source 1..120: note = 1A3.88474[CD28]_H1.9
EVQLVESGGGLVQPGGSLRLSCAASGFTSSNYWMHWVRQAPGKGLVWVSRINSDGSSASFADSVRGRFTISRDNAKNTLYLQLNSLRAEDTAVYYCARADSSSWYLFDNWGQGTLVTVSS

SEQ ID NO: 2758 - protein, 120 aa, synthetic construct
  source 1..120: note = 1A3.88474[CD28]_H1.10
EVQLVESGGGLVQPGGSLRLSCAASGFTMSNTWMHWVRQAPGKGLVWVSRINSDGSSASFADSVRGRFTISRDNAKNTLYLQLNSLRAEDTAVYYCARADSSSWYLFDNWGQGTLVTVSS

SEQ ID NO: 2759 - protein, 120 aa, synthetic construct
  source 1..120: note = 1A3.88474[CD28]_H1.11
EVQLVESGGGLVQPGGSLRLSCAASGFTGRNYWMHWVRQAPGKGLVWVSRINSDGSSASFADSVRGRFTISRDNAKNTLYLQLNSLRAEDTAVYYCARADSSSWYLFDNWGQGTLVTVSS

SEQ ID NO: 2760 - protein, 120 aa, synthetic construct
  source 1..120: note = 1A3.88474[CD28]_H1.12
EVQLVESGGGLVQPGGSLRLSCAASGFTFGNTWMHWVRQAPGKGLVWVSRINSDGSSASFADSVRGRFTISRDNAKNTLYLQLNSLRAEDTAVYYCARADSSSWYLFDNWGQGTLVTVSS

SEQ ID NO: 2761 - protein, 120 aa, synthetic construct
  source 1..120: note = 1A3.88474[CD28]_H1.13
EVQLVESGGGLVQPGGSLRLSCAASGFTASNYWMHWVRQAPGKGLVWVSRINSDGSSASFADSVRGRFTISRDNAKNTLYLQLNSLRAEDTAVYYCARADSSSWYLFDNWGQGTLVTVSS

SEQ ID NO: 2762 - protein, 30 aa, synthetic construct
  source 1..30: note = 1A3.88474 VH HFR1
  VARIANT 25: note = S or F
  VARIANT 29: note = F, Q, T, G, S, M or A
  VARIANT 30: note = S, G or R
EVQLVESGGGLVQPGGSLRLSCAAXGFTXX

SEQ ID NO: 2763 - protein, 5 aa, synthetic construct
  source 1..5: note = 1A3.88474 VH HCDR1
  VARIANT 2: note = Y, E or Y
NXWMH

SEQ ID NO: 2764 - protein, 14 aa, synthetic construct
  source 1..14: note = 1A3.88474 VH HFR2
WVRQAPGKGLVWVS

SEQ ID NO: 2765 - protein, 17 aa, synthetic construct
  source 1..17: note = 1A3.88474 VH HCDR2
  VARIANT 3: note = R, N or S
  VARIANT 4: note = S, K, N or G
  VARIANT 8: note = S or T
RIXXDGSXASFADSVRG

SEQ ID NO: 2766 - protein, 32 aa, synthetic construct
  source 1..32: note = 1A3.88474 VH HFR3
RFTISRDNAKNTLYLQLNSLRAEDTAVYYCAR

SEQ ID NO: 2767 - protein, 11 aa, synthetic construct
  source 1..11: note = 1A3.88474 VH HCDR3
  VARIANT 1: note = A or S
  VARIANT 8: note = L or R
  VARIANT 11: note = N or S
XDSSSWYXFDX

SEQ ID NO: 2768 - protein, 11 aa, synthetic construct
  source 1..11: note = 1A3.88474 VH HFR4
WGQGTLVTVSS

SEQ ID NO: 2769 - protein, 449 aa, synthetic construct
  source 1..449: note = XENP41816 Chain 1 - 1H11.88474[CD28]_H1
EVQLVESGGGLVQPGGSLRLSCAASGFTFSSYWMHWVRQAPGKGLVWVSRINNDGSSASFADSVRGRFTISRDNAKNTLSLQMNSLRAEDTAVYYCARADSSSWYHFDYWGQGTLVTVSSASTKGPSVFPLAPSSKSTSGGTAALGCLVKDYFPEPVTVSWNSGALTSGVHTFPAVLQSSGLYSLSSVVTVPSSSLGTQTYICNVNHKPSNTKVDKKVEPKSCDKTHTCPPCPAPPVAGPSVFLFPPKPKDTLMISRTPEVTCVVVDVKHEDPEVKFNWYVDGVEVHNAKTKPREEQYNSTYRVVSVLTVLHQDWLNGKEYKCKVSNKALPAPIEKTISKAKGQPREPQVYTLPPSREEMTKNQVSLTCLVKGFYPSDIAVEWESNGQPENNYKTTPPVLDSDGSFFLYSKLTVDKSRWQQGNVFSCSVMHEALHNHYTQKSLSLSPGK

SEQ ID NO: 2770 - protein, 214 aa, synthetic construct
  source 1..214: note = XENP41816 Chain 2 - 1H11.88474[CD28]_L1
EIVLTQSPATLSLSPGERATLSCRASQSVSSYLAWYQQKPGQAPRLLIFDASNRATGIPARFSGSGSGTDFTLTISSLEPEDFAVYYCQQRSNWPPTFGQGTKVEIKRTVAAPSVFIFPPSDEQLKSGTASVVCLLNNFYPREAKVQWKVDNALQSGNSQESVTEQDSKDSTYSLSSTLTLSKADYEKHKVYACEVTHQGLSSPVTKSFNRGEC

SEQ ID NO: 2771 - protein, 449 aa, synthetic construct
  source 1..449: note = XENP41807 Chain 1 - 1G1-1.88474[CD28]_H1
EVQLVESGGGLVQPGGSLRLSCAASGFTFSSYWMHWVRQAPGKGLVWVSRVNSDGSSASFADSVKGRFTISRDNAKNTLYLQMNSLRAEDTAVYYCARADNSSWYHFDYWGQGTLVTVSSASTKGPSVFPLAPSSKSTSGGTAALGCLVKDYFPEPVTVSWNSGALTSGVHTFPAVLQSSGLYSLSSVVTVPSSSLGTQTYICNVNHKPSNTKVDKKVEPKSCDKTHTCPPCPAPPVAGPSVFLFPPKPKDTLMISRTPEVTCVVVDVKHEDPEVKFNWYVDGVEVHNAKTKPREEQYNSTYRVVSVLTVLHQDWLNGKEYKCKVSNKALPAPIEKTISKAKGQPREPQVYTLPPSREEMTKNQVSLTCLVKGFYPSDIAVEWESNGQPENNYKTTPPVLDSDGSFFLYSKLTVDKSRWQQGNVFSCSVMHEALHNHYTQKSLSLSPGK

SEQ ID NO: 2772 - protein, 214 aa, synthetic construct
  source 1..214: note = XENP41807 Chain 2 - 1G1-1.88474[CD28]_L1
EIVLTQSPATLSLSPGERATLSCRASQSVSSYLAWYQQKPGQAPRLLIYDASNRATAIPARFSGSGSGTDFTLTISSLEPEDFAVYYCQQRRNWPPTFGQGTKVEIKRTVAAPSVFIFPPSDEQLKSGTASVVCLLNNFYPREAKVQWKVDNALQSGNSQESVTEQDSKDSTYSLSSTLTLSKADYEKHKVYACEVTHQGLSSPVTKSFNRGEC

SEQ ID NO: 2773 - protein, 451 aa, synthetic construct
  source 1..451: note = XENP41802 Chain 1 - 1E6-1.88474[CD28]_H1
QVQLQESGPGLVKPSGTLSLTCAVSGDSISSGNWWSWVRQPPGKGLEWIGEIYHSGSSNYNPSLKSRVTISVDKSKNQFSLKLNTVTAADTAVYYCAREGLGSYYYYGMDVWGQGTTVTVSSASTKGPSVFPLAPSSKSTSGGTAALGCLVKDYFPEPVTVSWNSGALTSGVHTFPAVLQSSGLYSLSSVVTVPSSSLGTQTYICNVNHKPSNTKVDKKVEPKSCDKTHTCPPCPAPPVAGPSVFLFPPKPKDTLMISRTPEVTCVVVDVKHEDPEVKFNWYVDGVEVHNAKTKPREEQYNSTYRVVSVLTVLHQDWLNGKEYKCKVSNKALPAPIEKTISKAKGQPREPQVYTLPPSREEMTKNQVSLTCLVKGFYPSDIAVEWESNGQPENNYKTTPPVLDSDGSFFLYSKLTVDKSRWQQGNVFSCSVMHEALHNHYTQKSLSLSPGK

SEQ ID NO: 2774 - protein, 214 aa, synthetic construct; identical to SEQ ID NO: 2686
  source 1..214: note = XENP41802 Chain 2 - 1E6-1.88474[CD28]_L1

SEQ ID NO: 2775 - protein, 444 aa, synthetic construct
  source 1..444: note = XENP41797 Chain 1 - 1A1-5.88488[CD28]_H1
EVQLVESGGGLVHPGGSLRLSCAASGFSFITYEMNWVRQAPGKGLEWVSYISSSGSAIYYADSVKGRFTISRDNVKNSLYLQMNSLRAEDTAVYYCARGAVVDYWGQGIWVTVSSASTKGPSVFPLAPSSKSTSGGTAALGCLVKDYFPEPVTVSWNSGALTSGVHTFPAVLQSSGLYSLSSVVTVPSSSLGTQTYICNVNHKPSNTKVDKKVEPKSCDKTHTCPPCPAPPVAGPSVFLFPPKPKDTLMISRTPEVTCVVVDVKHEDPEVKFNWYVDGVEVHNAKTKPREEQYNSTYRVVSVLTVLHQDWLNGKEYKCKVSNKALPAPIEKTISKAKGQPREPQVYTLPPSREEMTKNQVSLTCLVKGFYPSDIAVEWESNGQPENNYKTTPPVLDSDGSFFLYSKLTVDKSRWQQGNVFSCSVMHEALHNHYTQKSLSLSPGK

SEQ ID NO: 2776 - protein, 214 aa, synthetic construct; identical to SEQ ID NO: 2686
  source 1..214: note = XENP41797 Chain 2 - 1A1-5.88488[CD28]_L1

SEQ ID NO: 2777 - protein, 454 aa, synthetic construct
  source 1..454: note = XENP41781 Chain 1 - 1E2-5.88488[CD28]_H1
EVQLEESGGGLVQPGGSLRLSCAASGFTVSSNFMSWFRQAPGKGLEWVSVIYSGGSINHADSVKGRFTTSKHNSKNTVYLQMNSLRSEDTAVYYCARHGITGTTGDYHYYGMDVWGQGTTVTVSSASTKGPSVFPLAPSSKSTSGGTAALGCLVKDYFPEPVTVSWNSGALTSGVHTFPAVLQSSGLYSLSSVVTVPSSSLGTQTYICNVNHKPSNTKVDKKVEPKSCDKTHTCPPCPAPPVAGPSVFLFPPKPKDTLMISRTPEVTCVVVDVKHEDPEVKFNWYVDGVEVHNAKTKPREEQYNSTYRVVSVLTVLHQDWLNGKEYKCKVSNKALPAPIEKTISKAKGQPREPQVYTLPPSREEMTKNQVSLTCLVKGFYPSDIAVEWESNGQPENNYKTTPPVLDSDGSFFLYSKLTVDKSRWQQGNVFSCSVMHEALHNHYTQKSLSLSPGK

SEQ ID NO: 2778 - protein, 214 aa, synthetic construct
  source 1..214: note = XENP41781 Chain 2 - 1E2-5.88488[CD28]_L1
EIVLTQSPATLSLSPGERATLSCRASQSVSSYLAWYQQKPGQAPRLLIYDASNRATGIPARFSGSGSGTDFTLTISSLEPEDFAIYYCQQRSNWPPTFGQGTKVEIKRTVAAPSVFIFPPSDEQLKSGTASVVCLLNNFYPREAKVQWKVDNALQSGNSQESVTEQDSKDSTYSLSSTLTLSKADYEKHKVYACEVTHQGLSSPVTKSFNRGEC

SEQ ID NO: 2779 - protein, 454 aa, synthetic construct
  source 1..454: note = XENP41861 Chain 1 - 2F6.88497[CD28]_H1
EVQLVESGGGLVQPGGSLRLSCAASGFTVSSNYMSWFRQAPGKGVEWVSVIYSGGSTYYADSVKGRFIISRDNSKNTLYLQMNSLRAEDTAVYYCARHGITGSAGYYYYYGMDVWGQGTTVTVSSASTKGPSVFPLAPSSKSTSGGTAALGCLVKDYFPEPVTVSWNSGALTSGVHTFPAVLQSSGLYSLSSVVTVPSSSLGTQTYICNVNHKPSNTKVDKKVEPKSCDKTHTCPPCPAPPVAGPSVFLFPPKPKDTLMISRTPEVTCVVVDVKHEDPEVKFNWYVDGVEVHNAKTKPREEQYNSTYRVVSVLTVLHQDWLNGKEYKCKVSNKALPAPIEKTISKAKGQPREPQVYTLPPSREEMTKNQVSLTCLVKGFYPSDIAVEWESNGQPENNYKTTPPVLDSDGSFFLYSKLTVDKSRWQQGNVFSCSVMHEALHNHYTQKSLSLSPGK

SEQ ID NO: 2780 - protein, 214 aa, synthetic construct
  source 1..214: note = XENP41861 Chain 2 - 2F6.88497[CD28]_L1
EIVLTQSPATLSLSPGERATLSCRASQSVSRYLAWYQQKPGQAPRLLIYDASNRATGIPARFSGSGSGTDFTLTISSLEPEDFAVYYCQQRSNWPPTFGQGTKVEIKRTVAAPSVFIFPPSDEQLKSGTASVVCLLNNFYPREAKVQWKVDNALQSGNSQESVTEQDSKDSTYSLSSTLTLSKADYEKHKVYACEVTHQGLSSPVTKSFNRGEC

SEQ ID NO: 2781 - protein, 454 aa, synthetic construct; identical to SEQ ID NO: 2779
  source 1..454: note = XENP42422 Chain 1 - 2F6.88497[CD28]_H1

SEQ ID NO: 2782 - protein, 214 aa, synthetic construct; identical to SEQ ID NO: 2686
  source 1..214: note = XENP42422 Chain 2 - 6B1[PD-L1]_L1

SEQ ID NO: 2783 - protein, 449 aa, synthetic construct
  source 1..449: note = XENP41880 Chain 1 - 1H2.83967[CD28]_H1
EVQLVESGGGLVQPGGSLRLSCAASGFTFSSYWMHWVRQAPGKGLVWVSRINSDGSSASHADSVKGRFTISRDNAKNTLYLQVNGLRAEDTAVYYCARADSSSWYKFDYWGQGTLVTVSSASTKGPSVFPLAPSSKSTSGGTAALGCLVKDYFPEPVTVSWNSGALTSGVHTFPAVLQSSGLYSLSSVVTVPSSSLGTQTYICNVNHKPSNTKVDKKVEPKSCDKTHTCPPCPAPPVAGPSVFLFPPKPKDTLMISRTPEVTCVVVDVKHEDPEVKFNWYVDGVEVHNAKTKPREEQYNSTYRVVSVLTVLHQDWLNGKEYKCKVSNKALPAPIEKTISKAKGQPREPQVYTLPPSREEMTKNQVSLTCLVKGFYPSDIAVEWESNGQPENNYKTTPPVLDSDGSFFLYSKLTVDKSRWQQGNVFSCSVMHEALHNHYTQKSLSLSPGK

SEQ ID NO: 2784 - protein, 214 aa, synthetic construct; identical to SEQ ID NO: 2722
  source 1..214: note = XENP41880 Chain 2 - 1H2.83967[CD28]_L1

SEQ ID NO: 2785 - protein, 449 aa, synthetic construct; identical to SEQ ID NO: 2783
  source 1..449: note = XENP42424 Chain 1 - 1H2.83967[CD28]_H1

SEQ ID NO: 2786 - protein, 214 aa, synthetic construct; identical to SEQ ID NO: 2686
  source 1..214: note = XENP42424 Chain 2 - 6B1[PD-L1]_L1

SEQ ID NO: 2787 - protein, 451 aa, synthetic construct
  source 1..451: note = XENP41909 Chain 1 - 1E4-3.83967[CD28]_H1
EVQLVESGGGLVQPGGSLRLSCAASGFTFSSYWMHWVRQAPGKGLVWVSRINSDGSSASFADSVKGRFTISRDNAKNTLYLQMNSLRAEDTSVYYCAREGYSSSWYKYFHHWGQGTLVTVSSASTKGPSVFPLAPSSKSTSGGTAALGCLVKDYFPEPVTVSWNSGALTSGVHTFPAVLQSSGLYSLSSVVTVPSSSLGTQTYICNVNHKPSNTKVDKKVEPKSCDKTHTCPPCPAPPVAGPSVFLFPPKPKDTLMISRTPEVTCVVVDVKHEDPEVKFNWYVDGVEVHNAKTKPREEQYNSTYRVVSVLTVLHQDWLNGKEYKCKVSNKALPAPIEKTISKAKGQPREPQVYTLPPSREEMTKNQVSLTCLVKGFYPSDIAVEWESNGQPENNYKTTPPVLDSDGSFFLYSKLTVDKSRWQQGNVFSCSVMHEALHNHYTQKSLSLSPGK

SEQ ID NO: 2788 - protein, 214 aa, synthetic construct
  source 1..214: note = XENP41909 Chain 2 - 1E4-3.83967[CD28]_L1
EIVLTQSPATLSLSPGERATLSCRASQSVSSYLAWYQQKPGQAPRLLIYDASNRATGIPARVSGSGSGTDFTLTISSLEPEDFAVYYCQQRSNWPPTFGQGTKVEIKRTVAAPSVFIFPPSDEQLKSGTASVVCLLNNFYPREAKVQWKVDNALQSGNSQESVTEQDSKDSTYSLSSTLTLSKADYEKHKVYACEVTHQGLSSPVTKSFNRGEC

SEQ ID NO: 2789 - protein, 451 aa, synthetic construct; identical to SEQ ID NO: 2787
  source 1..451: note = XENP42427 Chain 1 - 1E4-3.83967[CD28]_H1

SEQ ID NO: 2790 - protein, 214 aa, synthetic construct; identical to SEQ ID NO: 2686
  source 1..214: note = XENP42427 Chain 2 - 6B1[PD-L1]_L1

SEQ ID NO: 2791 - protein, 452 aa, synthetic construct
  source 1..452: note = XENP41918 Chain 1 - 1C2-2.83967[CD28]_H1
EVQLVESGGGLVQPGGSLRLSCVASGFTFSNYAMHWVRQAPGKGLKYISAISTSGSSIYYTNSVKDRFTISRDNSKNTLYLQMGSLTVEDMAVYYCAGGAASGHYFYYGMDVWGQGTTVTVSSASTKGPSVFPLAPSSKSTSGGTAALGCLVKDYFPEPVTVSWNSGALTSGVHTFPAVLQSSGLYSLSSVVTVPSSSLGTQTYICNVNHKPSNTKVDKKVEPKSCDKTHTCPPCPAPPVAGPSVFLFPPKPKDTLMISRTPEVTCVVVDVKHEDPEVKFNWYVDGVEVHNAKTKPREEQYNSTYRVVSVLTVLHQDWLNGKEYKCKVSNKALPAPIEKTISKAKGQPREPQVYTLPPSREEMTKNQVSLTCLVKGFYPSDIAVEWESNGQPENNYKTTPPVLDSDGSFFLYSKLTVDKSRWQQGNVFSCSVMHEALHNHYTQKSLSLSPGK

SEQ ID NO: 2792 - protein, 214 aa, synthetic construct
  source 1..214: note = XENP41918 Chain 2 - 1C2-2.83967[CD28]_L1
EVVLTQSPATLSLSPGERVTLSCRASQSVTSYLAWYQQKPGQAPRLLIYDTSNRATGIPAKFSGSGSGTDFTLTISSLEPEDFAVYYCQQRYIWPPTFGQGAKVEIKRTVAAPSVFIFPPSDEQLKSGTASVVCLLNNFYPREAKVQWKVDNALQSGNSQESVTEQDSKDSTYSLSSTLTLSKADYEKHKVYACEVTHQGLSSPVTKSFNRGEC

SEQ ID NO: 2793 - protein, 452 aa, synthetic construct; identical to SEQ ID NO: 2791
  source 1..452: note = XENP42428 Chain 1 - 1C2-2.83967[CD28]_H1

SEQ ID NO: 2794 - protein, 214 aa, synthetic construct; identical to SEQ ID NO: 2686
  source 1..214: note = XENP42428 Chain 2 - 6B1[PD-L1]_L1

SEQ ID NO: 2795 - protein, 453 aa, synthetic construct
  source 1..453: note = XENP41956 Chain 1 - 1A11.83967[CD28]_H1
EVQLVESGGGVVQPGGSLRLSCAASGFTFDDYAMHWVRQAPGKGLEWVSLISGDGGSTYYADSVKGRFTISRDNSKNSLYLQMNSLRTEDTALYYCAKDPLPASKYYYYGMDVWGQGTTVTVSSASTKGPSVFPLAPSSKSTSGGTAALGCLVKDYFPEPVTVSWNSGALTSGVHTFPAVLQSSGLYSLSSVVTVPSSSLGTQTYICNVNHKPSNTKVDKKVEPKSCDKTHTCPPCPAPPVAGPSVFLFPPKPKDTLMISRTPEVTCVVVDVKHEDPEVKFNWYVDGVEVHNAKTKPREEQYNSTYRVVSVLTVLHQDWLNGKEYKCKVSNKALPAPIEKTISKAKGQPREPQVYTLPPSREEMTKNQVSLTCLVKGFYPSDIAVEWESNGQPENNYKTTPPVLDSDGSFFLYSKLTVDKSRWQQGNVFSCSVMHEALHNHYTQKSLSLSPGK

SEQ ID NO: 2796 - protein, 214 aa, synthetic construct
  source 1..214: note = XENP41956 Chain 2 - 1A11.83967[CD28]_L1
EIVLTQSPATLSLSPGERATLSCRASQSLSAYLAWYQQKPGQAPRLLIYDALNRATDIPARFRGSGSGTDFTLTISSLEPEDFAVYYCQQRSSWPPTFGQGTKVELKRTVAAPSVFIFPPSDEQLKSGTASVVCLLNNFYPREAKVQWKVDNALQSGNSQESVTEQDSKDSTYSLSSTLTLSKADYEKHKVYACEVTHQGLSSPVTKSFNRGEC

SEQ ID NO: 2797 - protein, 453 aa, synthetic construct; identical to SEQ ID NO: 2795
  source 1..453: note = XENP42431 Chain 1 - 1A11.83967[CD28]_H1

SEQ ID NO: 2798 - protein, 214 aa, synthetic construct; identical to SEQ ID NO: 2686
  source 1..214: note = XENP42431 Chain 2 - 6B1[PD-L1]_L1

SEQ ID NO: 2799 - protein, 121 aa, synthetic construct
  source 1..121: note = CD28.3[CD28]_H0L0 Variable heavy (vh) domain
EVKLQQSGAELVKPGASVRLSCKASGYTFTEYIIHWIKLRSGQGLEWIGWFYPGSNDIQYNAKFKGKATLTADKSSSTVYMELTGLTSEDSAVYFCARRDDFSGYDALPYWGQGTMVTVSS

SEQ ID NO: 2800 - protein, 5 aa, synthetic construct
  source 1..5: note = CD28.3[CD28]_H0L0 vhCDR1
EYIIH

SEQ ID NO: 2801 - protein, 17 aa, synthetic construct
  source 1..17: note = CD28.3[CD28]_H0L0 vhCDR2
WFYPGSNDIQYNAKFKG

SEQ ID NO: 2802 - protein, 12 aa, synthetic construct
  source 1..12: note = CD28.3[CD28]_H0L0 vhCDR3
RDDFSGYDALPY

SEQ ID NO: 2803 - protein, 107 aa, synthetic construct
  source 1..107: note = CD28.3[CD28]_H0L0 Variable light (vl) domain
DIQMTQSPASLSVSVGETVTITCRTNENIYSNLAWYQQKQGKSPQLLIYAATHLVEGVPSRFSGSGSGTQYSLKITSLQSEDFGNYYCQHFWGTPCTFGGGTKLEIK

SEQ ID NO: 2804 - protein, 11 aa, synthetic construct
  source 1..11: note = CD28.3[CD28]_H0L0 vlCDR1
RTNENIYSNLA

SEQ ID NO: 2805 - protein, 7 aa, synthetic construct
  source 1..7: note = CD28.3[CD28]_H0L0 vlCDR2
AATHLVE

SEQ ID NO: 2806 - protein, 9 aa, synthetic construct
  source 1..9: note = CD28.3[CD28]_H0L0 vlCDR3
QHFWGTPCT

SEQ ID NO: 2807 - protein, 121 aa, synthetic construct
  source 1..121: note = hCD28.3[CD28]_H1L1 Variable heavy (vh) domain
QVQLQQSGAELKKPGASVKVSCKASGYTFTEYIIHWIKLRSGQGLEWIGWFYPGSNDIQYNAQFKGKATLTADKSSSTVYMELTGLTPEDSAVYFCARRDDFSGYDALPYWGQGTLVTVSA

SEQ ID NO: 2808 - protein, 5 aa, synthetic construct
  source 1..5: note = hCD28.3[CD28]_H1L1 vhCDR1
EYIIH

SEQ ID NO: 2809 - protein, 17 aa, synthetic construct
  source 1..17: note = hCD28.3[CD28]_H1L1 vhCDR2
WFYPGSNDIQYNAQFKG

SEQ ID NO: 2810 - protein, 12 aa, synthetic construct
  source 1..12: note = hCD28.3[CD28]_H1L1 vhCDR3
RDDFSGYDALPY

SEQ ID NO: 2811 - protein, 107 aa, synthetic construct
  source 1..107: note = hCD28.3[CD28]_H1L1 Variable light (vl) domain
DIQMTQSPSSLSASVGDRVTITCKTNENIYSNLAWYQQKDGKSPQLLIYAATHLVEGVPSRFSGSGSGTQYSLTISSLQPEDFGNYYCQHFWGTPCTFGGGTKLEIK

SEQ ID NO: 2812 - protein, 11 aa, synthetic construct
  source 1..11: note = hCD28.3[CD28]_H1L1 vlCDR1
KTNENIYSNLA

SEQ ID NO: 2813 - protein, 7 aa, synthetic construct
  source 1..7: note = hCD28.3[CD28]_H1L1 vlCDR2
AATHLVE

SEQ ID NO: 2814 - protein, 9 aa, synthetic construct
  source 1..9: note = hCD28.3[CD28]_H1L1 vlCDR3
QHFWGTPCT

SEQ ID NO: 2815 - protein, 120 aa, synthetic construct
  source 1..120: note = 5.11A1[CD28]_H0L0 Variable heavy (vh) domain
QVQLQQSGPELVKPGTSVRISCEASGYTFTSYYIHWVKQRPGQGLEWIGCIYPGNVNTNYNEKFKDKATLIVDTSSNTAYMQLSRMTSEDSAVYFCTRSHYGLDWNFDVWGAGTTVTVSS

SEQ ID NO: 2816 - protein, 5 aa, synthetic construct
  source 1..5: note = 5.11A1[CD28]_H0L0 vhCDR1
SYYIH

SEQ ID NO: 2817 - protein, 17 aa, synthetic construct
  source 1..17: note = 5.11A1[CD28]_H0L0 vhCDR2
CIYPGNVNTNYNEKFKD

SEQ ID NO: 2818 - protein, 11 aa, synthetic construct
  source 1..11: note = 5.11A1[CD28]_H0L0 vhCDR3
SHYGLDWNFDV

SEQ ID NO: 2819 - protein, 107 aa, synthetic construct
  source 1..107: note = 5.11A1[CD28]_H0L0 Variable light (vl) domain
DIQMNQSPSSLSASLGDTITITCHASQNIYVWLNWYQQKPGNIPKLLIYKASNLHTGVPSRFSGSGSGTGFTLTISSLQPEDIATYYCQQGQTYPYTFGGGTKLEIK

SEQ ID NO: 2820 - protein, 11 aa, synthetic construct
  source 1..11: note = 5.11A1[CD28]_H0L0 vlCDR1
HASQNIYVWLN

SEQ ID NO: 2821 - protein, 7 aa, synthetic construct
  source 1..7: note = 5.11A1[CD28]_H0L0 vlCDR2
KASNLHT

SEQ ID NO: 2822 - protein, 9 aa, synthetic construct
  source 1..9: note = 5.11A1[CD28]_H0L0 vlCDR3
QQGQTYPYT

SEQ ID NO: 2823 - protein, 120 aa, synthetic construct
  source 1..120: note = TGN1412_H1L1 Variable heavy (vh) domain
QVQLVQSGAEVKKPGASVKVSCKASGYTFTSYYIHWVRQAPGQGLEWIGCIYPGNVNTNYNEKFKDRATLTVDTSISTAYMELSRLRSDDTAVYFCTRSHYGLDWNFDVWGQGTTVTVSS

SEQ ID NO: 2824 - protein, 107 aa, synthetic construct
  source 1..107: note = TGN1412_H1L1 Variable light (vl) domain
DIQMTQSPSSLSASVGDRVTITCHASQNIYVWLNWYQQKPGKAPKLLIYKASNLHTGVPSRFSGSGSGTDFTLTISSLQPEDFATYYCQQGQTYPYTFGGGTKVEIK

SEQ ID NO: 2825 - protein, 127 aa, synthetic construct
  source 1..127: note = 341VL34[CD28]_H1L1 Variable heavy (vh) domain
EVQLVESGGGLVKPGGSLRLSCGGSGFTFNNAWMNWVRQAPGKGLEWVGRIKGKTDGGTADYAAPVKGRFTISRDYSKNTLYLQMNSLTTEDTAVYYCNTDLPYYYGSGRYSGMDVWGQGTTVTVSS

SEQ ID NO: 2826 - protein, 5 aa, synthetic construct
  source 1..5: note = 341VL34[CD28]_H1L1 vhCDR1
NAWMN

SEQ ID NO: 2827 - protein, 19 aa, synthetic construct
  source 1..19: note = 341VL34[CD28]_H1L1 vhCDR2
RIKGKTDGGTADYAAPVKG

SEQ ID NO: 2828 - protein, 16 aa, synthetic construct
  source 1..16: note = 341VL34[CD28]_H1L1 vhCDR3
DLPYYYGSGRYSGMDV

SEQ ID NO: 2829 - protein, 104 aa, synthetic construct
  source 1..104: note = 341VL34[CD28]_H1L1 Variable light (vl) domain
EIVLTQSPATLSLSPGERATLSCRASQSVSSYLAWYQQKPGQAPRLLIYDASNRATGIPARFSGSGSGTDFTLTISSLEPEDFAVYYCQQRSNTFGPGTKVDIK

SEQ ID NO: 2830 - protein, 11 aa, synthetic construct
  source 1..11: note = 341VL34[CD28]_H1L1 vlCDR1
RASQSVSSYLA

SEQ ID NO: 2831 - protein, 7 aa, synthetic construct
  source 1..7: note = 341VL34[CD28]_H1L1 vlCDR2
DASNRAT

SEQ ID NO: 2832 - protein, 6 aa, synthetic construct
  source 1..6: note = 341VL34[CD28]_H1L1 vlCDR3
QQRSNT

SEQ ID NO: 2833 - protein, 127 aa, synthetic construct
  source 1..127: note = 341VL36[CD28]_H1L1 Variable heavy (vh) domain
EVQLVESGGGLVKPGGSLRLSCGGSGFTFNNAWMNWVRQAPGKGLEWVGRIKGKTDGGTADYAAPVKGRFTISRDYSKNTLYLQMNSLKTEDTGVYYCTTYLPYYYGSERWSGMDVWGQGTTVTVSS

SEQ ID NO: 2834 - protein, 5 aa, synthetic construct
  source 1..5: note = 341VL36[CD28]_H1L1 vhCDR1
NAWMN

SEQ ID NO: 2835 - protein, 19 aa, synthetic construct
  source 1..19: note = 341VL36[CD28]_H1L1 vhCDR2
RIKGKTDGGTADYAAPVKG

SEQ ID NO: 2836 - protein, 16 aa, synthetic construct
  source 1..16: note = 341VL36[CD28]_H1L1 vhCDR3
YLPYYYGSERWSGMDV

SEQ ID NO: 2837 - protein, 104 aa, synthetic construct; identical to SEQ ID NO: 2829
  source 1..104: note = 341VL36[CD28]_H1L1 Variable light (vl) domain

SEQ ID NO: 2838 - protein, 11 aa, synthetic construct
  source 1..11: note = 341VL36[CD28]_H1L1 vlCDR1
RASQSVSSYLA

SEQ ID NO: 2839 - protein, 7 aa, synthetic construct
  source 1..7: note = 341VL36[CD28]_H1L1 vlCDR2
DASNRAT

SEQ ID NO: 2840 - protein, 6 aa, synthetic construct
  source 1..6: note = 341VL36[CD28]_H1L1 vlCDR3
QQRSNT

SEQ ID NO: 2841 - protein, 126 aa, synthetic construct
  source 1..126: note = 281VL4[CD28]_H1L1 Variable heavy (vh) domain
EVQLVQSGSELKKPGSSVKVSCKASGGTSRSFAISWVRQAPGQGLEWMGGIIPIFGPANYAQKFQGRVTITADESTSTAYMELSSLRSEDTAVYYCARHAIAMGWGVITTNYFDSWGQGTMVTVSS

SEQ ID NO: 2842 - protein, 5 aa, synthetic construct
  source 1..5: note = 281VL4[CD28]_H1L1 vhCDR1
SFAIS

SEQ ID NO: 2843 - protein, 17 aa, synthetic construct
  source 1..17: note = 281VL4[CD28]_H1L1 vhCDR2
GIIPIFGPANYAQKFQG

SEQ ID NO: 2844 - protein, 17 aa, synthetic construct
  source 1..17: note = 281VL4[CD28]_H1L1 vhCDR3
HAIAMGWGVITTNYFDS

SEQ ID NO: 2845 - protein, 108 aa, synthetic construct
  source 1..108: note = 281VL4[CD28]_H1L1 Variable light (vl) domain
EIVLTQSPGTLSLSPGERATLSCRASQSVSSSYLAWYQQKPGQAPRLLIYGASSRATGIPDRFSGSGSGTDFTLTISRLEPEDFAVYYCQQYGSSPITFGQGTRLEIK

SEQ ID NO: 2846 - protein, 12 aa, synthetic construct
  source 1..12: note = 281VL4[CD28]_H1L1 vlCDR1
RASQSVSSSYLA

SEQ ID NO: 2847 - protein, 7 aa, synthetic construct
  source 1..7: note = 281VL4[CD28]_H1L1 vlCDR2
GASSRAT

SEQ ID NO: 2848 - protein, 9 aa, synthetic construct
  source 1..9: note = 281VL4[CD28]_H1L1 vlCDR3
QQYGSSPIT

SEQ ID NO: 2849 - protein, 121 aa, synthetic construct
  source 1..121: note = HuTN228[CD28]_H1L1 Variable heavy (vh) domain
QVQLQESGPGLVKPSETLSLTCAVSGFSLTSYGVHWIRQPPGKGLEWLGVIWPGGGTNFNSALMSRLTISEDTSKNQVSLKLSSVTAADTAVYYCARDRAYGNYLYAMDYWGQGTLVTVSS

SEQ ID NO: 2850 - protein, 5 aa, synthetic construct
  source 1..5: note = HuTN228[CD28]_H1L1 vhCDR1
SYGVH

SEQ ID NO: 2851 - protein, 16 aa, synthetic construct
  source 1..16: note = HuTN228[CD28]_H1L1 vhCDR2
VIWPGGGTNFNSALMS

SEQ ID NO: 2852 - protein, 13 aa, synthetic construct
  source 1..13: note = HuTN228[CD28]_H1L1 vhCDR3
DRAYGNYLYAMDY

SEQ ID NO: 2853 - protein, 111 aa, synthetic construct
  source 1..111: note = HuTN228[CD28]_H1L1 Variable light (vl) domain
DIQMTQSPSSLSASVGDRVTITCRASESVEYYVTSLMQWYQQKPGKAPKLLIYAASNVDSGVPSRFSGSGSGTDFTLTISSLQPEDIATYYCQQSRKVPFTFGGGTKVEIK

SEQ ID NO: 2854 - protein, 15 aa, synthetic construct
  source 1..15: note = HuTN228[CD28]_H1L1 vlCDR1
RASESVEYYVTSLMQ

SEQ ID NO: 2855 - protein, 7 aa, synthetic construct
  source 1..7: note = HuTN228[CD28]_H1L1 vlCDR2
AASNVDS

SEQ ID NO: 2856 - protein, 9 aa, synthetic construct
  source 1..9: note = HuTN228[CD28]_H1L1 vlCDR3
QQSRKVPFT

SEQ ID NO: 2857 - protein, 124 aa, synthetic construct
  source 1..124: note = PV1[CD28]_H0L0 Variable heavy (vh) domain
QVQLKQSGAELVKPGASVKISCKTSGYTFTDGYMNWVEQKPGQGLEWIGRIDPDSGNTRYNQKFQGKATLTRDKSSSTVYMDLRSLTSEDSAVYYCARDGTFYGTYGYWYFDFWGQGTQVTVSS

SEQ ID NO: 2858 - protein, 5 aa, synthetic construct
  source 1..5: note = PV1[CD28]_H0L0 vhCDR1
DGYMN

SEQ ID NO: 2859 - protein, 17 aa, synthetic construct
  source 1..17: note = PV1[CD28]_H0L0 vhCDR2
RIDPDSGNTRYNQKFQG

SEQ ID NO: 2860 - protein, 15 aa, synthetic construct
  source 1..15: note = PV1[CD28]_H0L0 vhCDR3
DGTFYGTYGYWYFDF

SEQ ID NO: 2861 - protein, 113 aa, synthetic construct
  source 1..113: note = PV1[CD28]_H0L0 Variable light (vl) domain
DIVMTQSPYSLAVSAGEKVTMSCRSSQSLYYSGIKKNLLAWYQQKPGQSPKLLIYFTSTRLPGVPDRFTGSGSGTDYTLTITSVQAEDMGHYFCQQGISTPLTFGDGTKLEIR

SEQ ID NO: 2862 - protein, 17 aa, synthetic construct
  source 1..17: note = PV1[CD28]_H0L0 vlCDR1
RSSQSLYYSGIKKNLLA

SEQ ID NO: 2863 - protein, 7 aa, synthetic construct
  source 1..7: note = PV1[CD28]_H0L0 vlCDR2
FTSTRLP

SEQ ID NO: 2864 - protein, 9 aa, synthetic construct
  source 1..9: note = PV1[CD28]_H0L0 vlCDR3
QQGISTPLT

SEQ ID NO: 2865 - protein, 120 aa, synthetic construct
  source 1..120: note = m9.3[CD28]_H0L0 Variable heavy (vh) domain
EVKLQQSGPGLVTPSQSLSITCTVSGFSLSDYGVHWVRQSPGQGLEWLGVIWAGGGTNYNSALMSRKSISKDNSKSQVFLKMNSLQADDTAVYYCARDKGYSYYYSMDYWGQGTSVTVSS

SEQ ID NO: 2866 - protein, 5 aa, synthetic construct
  source 1..5: note = m9.3[CD28]_H0L0 vhCDR1
DYGVH

SEQ ID NO: 2867 - protein, 16 aa, synthetic construct
  source 1..16: note = m9.3[CD28]_H0L0 vhCDR2
VIWAGGGTNYNSALMS

SEQ ID NO: 2868 - protein, 12 aa, synthetic construct
  source 1..12: note = m9.3[CD28]_H0L0 vhCDR3
DKGYSYYYSMDY

SEQ ID NO: 2869 - protein, 111 aa, synthetic construct
  source 1..111: note = m9.3[CD28]_H0L0 Variable light (vl) domain
DIELTQSPASLAVSLGQRATISCRASESVEYYVTSLMQWYQQKPGQPPKLLIFAASNVESGVPARFSGSGSGTNFSLNIHPVDEDDVAMYFCQQSRKVPYTFGGGTKLEIK

SEQ ID NO: 2870 - protein, 15 aa, synthetic construct
  source 1..15: note = m9.3[CD28]_H0L0 vlCDR1
RASESVEYYVTSLMQ

SEQ ID NO: 2871 - protein, 7 aa, synthetic construct
  source 1..7: note = m9.3[CD28]_H0L0 vlCDR2
AASNVES

SEQ ID NO: 2872 - protein, 9 aa, synthetic construct
  source 1..9: note = m9.3[CD28]_H0L0 vlCDR3
QQSRKVPYT

SEQ ID NO: 2873 - protein, 120 aa, synthetic construct
  source 1..120: note = hu9.3[CD28]_H1L1 Variable heavy (vh) domain
EVQLVQSGGGLVQPGGSLRLSCAGSGFTFSDYGVHWVRQAPGKGLEWVSAIWAGGGTNYASSVMGRFTISRDNAKNSLYLQMNSLRAEDMAVYYCARDKGYSYYYSMDYWGQGTLVTVSS

SEQ ID NO: 2874 - protein, 5 aa, synthetic construct
  source 1..5: note = hu9.3[CD28]_H1L1 vhCDR1
DYGVH

SEQ ID NO: 2875 - protein, 16 aa, synthetic construct
  source 1..16: note = hu9.3[CD28]_H1L1 vhCDR2
AIWAGGGTNYASSVMG

SEQ ID NO: 2876 - protein, 12 aa, synthetic construct
  source 1..12: note = hu9.3[CD28]_H1L1 vhCDR3
DKGYSYYYSMDY

SEQ ID NO: 2877 - protein, 111 aa, synthetic construct
  source 1..111: note = hu9.3[CD28]_H1L1 Variable light (vl) domain
DIVMTQSPDSLAVSLGERATINCRASESVEYYVTSLMAWYQQKPGQPPKLLIYAASNVESGVPDRFSGSGSGTNFSLTISSLQAEDVAVYYCQQSRKVPYTFGQGTKLEIK

SEQ ID NO: 2878 - protein, 15 aa, synthetic construct
  source 1..15: note = hu9.3[CD28]_H1L1 vlCDR1
RASESVEYYVTSLMA

SEQ ID NO: 2879 - protein, 7 aa, synthetic construct
  source 1..7: note = hu9.3[CD28]_H1L1 vlCDR2
AASNVES

SEQ ID NO: 2880 - protein, 9 aa, synthetic construct
  source 1..9: note = hu9.3[CD28]_H1L1 vlCDR3
QQSRKVPYT

SEQ ID NO: 2881 - protein, 127 aa, synthetic construct
  source 1..127: note = 9G2[CD28]_H0L0 Variable heavy (vh) domain
EVQLVESGGGLVQPGRSLKLSCAASGFTFSNYYMAWVRQAPTKGLEWVASITNTGGSTYYRDSVKGRFTISRDNAKSTLYLQMDSLRSEDTATYYCTRGLIYYYDGRNYYDYVMDAWGQGASVTVSS

SEQ ID NO: 2882 - protein, 5 aa, synthetic construct
  source 1..5: note = 9G2[CD28]_H0L0 vhCDR1
NYYMA

SEQ ID NO: 2883 - protein, 17 aa, synthetic construct
  source 1..17: note = 9G2[CD28]_H0L0 vhCDR2
SITNTGGSTYYRDSVKG

SEQ ID NO: 2884 - protein, 18 aa, synthetic construct
  source 1..18: note = 9G2[CD28]_H0L0 vhCDR3
GLIYYYDGRNYYDYVMDA

SEQ ID NO: 2885 - protein, 107 aa, synthetic construct
  source 1..107: note = 9G2[CD28]_H0L0 Variable light (vl) domain
DIQMTQSPASLSASLGETVSIECLASEGISNSLAWYQQKPGKSPQLLIYGASSLQDGVPSRFSGSGSGTQYSLKISGMQPEDEGVYYCQQGYKYPLTFGSGTKLEIK

SEQ ID NO: 2886 - protein, 11 aa, synthetic construct
  source 1..11: note = 9G2[CD28]_H0L0 vlCDR1
LASEGISNSLA

SEQ ID NO: 2887 - protein, 7 aa, synthetic construct
  source 1..7: note = 9G2[CD28]_H0L0 vlCDR2
GASSLQD

SEQ ID NO: 2888 - protein, 9 aa, synthetic construct
  source 1..9: note = 9G2[CD28]_H0L0 vlCDR3
QQGYKYPLT

SEQ ID NO: 2889 - protein, 127 aa, synthetic construct
  source 1..127: note = 9G2[CD28]_H1L1 Variable heavy (vh) domain
EVQLLESGGGLVQPGGSLRLSCAASGFTFSNYYMAWVRQAPGKGLEWVSSITNTGGSTYYRDSVKGRFTISRDNSKSTLYLQMNSLRAEDTAVYYCTRGLIYYYDGRNYYDYVMDAWGQGTTVTVSS

SEQ ID NO: 2890 - protein, 5 aa, synthetic construct
  source 1..5: note = 9G2[CD28]_H1L1 vhCDR1
NYYMA

SEQ ID NO: 2891 - protein, 17 aa, synthetic construct
  source 1..17: note = 9G2[CD28]_H1L1 vhCDR2
SITNTGGSTYYRDSVKG

SEQ ID NO: 2892 - protein, 18 aa, synthetic construct
  source 1..18: note = 9G2[CD28]_H1L1 vhCDR3
GLIYYYDGRNYYDYVMDA

SEQ ID NO: 2893 - protein, 107 aa, synthetic construct
  source 1..107: note = 9G2[CD28]_H1L1 Variable light (vl) domain
DIQMTQSPSSLSASVGDRVTITCRASEGISNSLAWYQQKPGKSPKLLIYGASSLQDGVPSRFSGSGSGTDYTLTISSLQPEDFATYYCQQGYKYPLTFGSGTKVEIK

SEQ ID NO: 2894 - protein, 11 aa, synthetic construct
  source 1..11: note = 9G2[CD28]_H1L1 vlCDR1
RASEGISNSLA

SEQ ID NO: 2895 - protein, 7 aa, synthetic construct
  source 1..7: note = 9G2[CD28]_H1L1 vlCDR2
GASSLQD

SEQ ID NO: 2896 - protein, 9 aa, synthetic construct
  source 1..9: note = 9G2[CD28]_H1L1 vlCDR3
QQGYKYPLT

SEQ ID NO: 2897 - protein, 121 aa, synthetic construct
  source 1..121: note = 2F10A3.140[CD28]_H1L1 Variable heavy (vh) domain
EVQLLESGGGLVQPGGSLRLSCAASGFSFGGNSMSWVRQAPGKGLEWVATISDNSYSTYYADSVKGRFTISRDNSKNTLYLQMNSLRAEDTAVYYCAKSGPGLRQVGFDYWGQGTLVTVSS

SEQ ID NO: 2898 - protein, 5 aa, synthetic construct
  source 1..5: note = 2F10A3.140[CD28]_H1L1 vhCDR1
GNSMS

SEQ ID NO: 2899 - protein, 17 aa, synthetic construct
  source 1..17: note = 2F10A3.140[CD28]_H1L1 vhCDR2
TISDNSYSTYYADSVKG

SEQ ID NO: 2900 - protein, 12 aa, synthetic construct
  source 1..12: note = 2F10A3.140[CD28]_H1L1 vhCDR3
SGPGLRQVGFDY

SEQ ID NO: 2901 - protein, 107 aa, synthetic construct; identical to SEQ ID NO: 2452
  source 1..107: note = 2F10A3.140[CD28]_H1L1 Variable light (vl) domain

SEQ ID NO: 2902 - protein, 11 aa, synthetic construct
  source 1..11: note = 2F10A3.140[CD28]_H1L1 vlCDR1
RASQSISSYLN

SEQ ID NO: 2903 - protein, 7 aa, synthetic construct
  source 1..7: note = 2F10A3.140[CD28]_H1L1 vlCDR2
AASSLQS

SEQ ID NO: 2904 - protein, 9 aa, synthetic construct
  source 1..9: note = 2F10A3.140[CD28]_H1L1 vlCDR3
QQSYSTPFT

SEQ ID NO: 2905 - protein, 121 aa, synthetic construct
  source 1..121: note = TN228[CD28]_H4L2 Variable heavy (vh) domain
QVQLQESGPGLVKPSETLSLTCTVSGFSLTSYGVHWVRQPPGKGLEWIGVIWPGGGTNYNSALKSRVTISEDTSKSQVSLKLSSVTAADTAVYYCARDRAYGNYLYAMDYWGQGTLVTVSS

SEQ ID NO: 2906 - protein, 5 aa, synthetic construct
  source 1..5: note = TN228[CD28]_H4L2 vhCDR1
SYGVH

SEQ ID NO: 2907 - protein, 16 aa, synthetic construct
  source 1..16: note = TN228[CD28]_H4L2 vhCDR2
VIWPGGGTNYNSALKS

SEQ ID NO: 2908 - protein, 13 aa, synthetic construct
  source 1..13: note = TN228[CD28]_H4L2 vhCDR3
DRAYGNYLYAMDY

SEQ ID NO: 2909 - protein, 111 aa, synthetic construct
  source 1..111: note = TN228[CD28]_H4L2 Variable light (vl) domain
EIVLTQSPATLSLSPGERATLSCRASESVEYYVTSLMQWYQQKPGQAPRLLIYAASNVDSGVPARFSGSGSGTDFTLTISSLEPEDFAVYYCQQSRKVPFTFGGGTKVEIK

SEQ ID NO: 2910 - protein, 15 aa, synthetic construct
  source 1..15: note = TN228[CD28]_H4L2 vlCDR1
RASESVEYYVTSLMQ

SEQ ID NO: 2911 - protein, 7 aa, synthetic construct
  source 1..7: note = TN228[CD28]_H4L2 vlCDR2
AASNVDS

SEQ ID NO: 2912 - protein, 9 aa, synthetic construct
  source 1..9: note = TN228[CD28]_H4L2 vlCDR3
QQSRKVPFT

SEQ ID NO: 2913 - protein, 454 aa, synthetic construct
  source 1..454: note = XENP42047 Chain 1 - XPL1-13G1[PD-L1]_H1_IgG1_pI(-)_Isosteric_A_/PVA_/S267K/L368 D/K370S
QVQLVESGGGLVKPGGSLRLSCAASGFTFSDYYMSWIRQAPGKGLEWVSYISSSSSYTNYADSVKGRFTISRDNAKNSLYLQMNSLRAEDTAVYYCASHFVILPGAIRPEYFQHWGQGTLVTVSSASTKGPSVFPLAPSSKSTSGGTAALGCLVKDYFPEPVTVSWNSGALTSGVHTFPAVLQSSGLYSLSSVVTVPSSSLGTQTYICNVNHKPSDTKVDKKVEPKSCDKTHTCPPCPAPPVAGPSVFLFPPKPKDTLMISRTPEVTCVVVDVKHEDPEVKFNWYVDGVEVHNAKTKPREEEYNSTYRVVSVLTVLHQDWLNGKEYKCKVSNKALPAPIEKTISKAKGQPREPQVYTLPPSREEMTKNQVSLTCDVSGFYPSDIAVEWESDGQPENNYKTTPPVLDSDGSFFLYSKLTVDKSRWEQGDVFSCSVMHEALHNHYTQKSLSLSPGK

SEQ ID NO: 2914 - protein, 479 aa, synthetic construct; identical to SEQ ID NO: 1135
  source 1..479: note = XENP42047 Chain 2 - 1A7[CD28]_H1.14_L1.71_scFv(GKPGS)4_Fc(216)_IgG1_C220S/PVA_/ S267K/S364K/E357Q

SEQ ID NO: 2915 - protein, 214 aa, synthetic construct; identical to SEQ ID NO: 2686
  source 1..214: note = XENP42047 Chain 3 - XPL1-13G1[PD-L1]_L1

SEQ ID NO: 2916 - protein, 450 aa, synthetic construct
  source 1..450: note = XENP42048 Chain 1 - XPL1-13G7[PD-L1]_H1_IgG1_pI(-)_Isosteric_A_/PVA_/S267K/L368 D/K370S
QVQLVESGPGLVKPSETLSLTCTVSGGSISSYFWSWIRQPPGKGLEWIGYIYYSGSTNYNPSLKSRVTISVDTSKNQFSLKLSSVTAADTAVYYCARGPLIQLWLPPFDYWGQGTLVTVSSASTKGPSVFPLAPSSKSTSGGTAALGCLVKDYFPEPVTVSWNSGALTSGVHTFPAVLQSSGLYSLSSVVTVPSSSLGTQTYICNVNHKPSDTKVDKKVEPKSCDKTHTCPPCPAPPVAGPSVFLFPPKPKDTLMISRTPEVTCVVVDVKHEDPEVKFNWYVDGVEVHNAKTKPREEEYNSTYRVVSVLTVLHQDWLNGKEYKCKVSNKALPAPIEKTISKAKGQPREPQVYTLPPSREEMTKNQVSLTCDVSGFYPSDIAVEWESDGQPENNYKTTPPVLDSDGSFFLYSKLTVDKSRWEQGDVFSCSVMHEALHNHYTQKSLSLSPGK

SEQ ID NO: 2917 - protein, 479 aa, synthetic construct; identical to SEQ ID NO: 1135
  source 1..479: note = XENP42048 Chain 2 - 1A7[CD28]_H1.14_L1.71_scFv(GKPGS)4_Fc(216)_IgG1_C220S/PVA_/ S267K/S364K/E357Q

SEQ ID NO: 2918 - protein, 214 aa, synthetic construct; identical to SEQ ID NO: 2686
  source 1..214: note = XENP42048 Chain 3 - XPL1-6B1_L1

SEQ ID NO: 2919 - protein, 450 aa, synthetic construct
  source 1..450: note = XENP42049 Chain 1 - XPL1-13G7[PD-L1]_H2_IgG1_pI(-)_Isosteric_A_/PVA_/S267K/L368 D/K370S
QVQLQESGPGLVKPSETLSLTCTVSGGSISSYFWSWIRQPPGKGLEWIGYIYYSGSTNYNPSLKSRVTISVDTSKNQFSLKLSSVTAADTAVYYCARGPLIQLWLPPFDYWGQGTLVTVSSASTKGPSVFPLAPSSKSTSGGTAALGCLVKDYFPEPVTVSWNSGALTSGVHTFPAVLQSSGLYSLSSVVTVPSSSLGTQTYICNVNHKPSDTKVDKKVEPKSCDKTHTCPPCPAPPVAGPSVFLFPPKPKDTLMISRTPEVTCVVVDVKHEDPEVKFNWYVDGVEVHNAKTKPREEEYNSTYRVVSVLTVLHQDWLNGKEYKCKVSNKALPAPIEKTISKAKGQPREPQVYTLPPSREEMTKNQVSLTCDVSGFYPSDIAVEWESDGQPENNYKTTPPVLDSDGSFFLYSKLTVDKSRWEQGDVFSCSVMHEALHNHYTQKSLSLSPGK

SEQ ID NO: 2920 - protein, 479 aa, synthetic construct; identical to SEQ ID NO: 1135
  source 1..479: note = XENP42049 Chain 2 - 1A7[CD28]_H1.14_L1.71_scFv(GKPGS)4_Fc(216)_IgG1_C220S/PVA_/ S267K/S364K/E357Q

SEQ ID NO: 2921 - protein, 214 aa, synthetic construct; identical to SEQ ID NO: 2686
  source 1..214: note = XENP42049 Chain 3 - XPL1-6B1_L1

SEQ ID NO: 2922 - protein, 453 aa, synthetic construct
  source 1..453: note = XENP42051 Chain 1 - XPL2-5C11[PD-L2]_H2_IgG1_pI(-)_Isosteric_A_/PVA_/S267K/L368 D/K370S
QVQLVQSGAEVKKPGSSVKVSCKASGGTFRNYAITWVRQAPGQGLEWMGRIIPILAIANYAQKFQGRVTITADKSTSTVYMELSSLRSEDTAVYYCATDLGIAAAGRAEYFQHWGQGTLVTVSSASTKGPSVFPLAPSSKSTSGGTAALGCLVKDYFPEPVTVSWNSGALTSGVHTFPAVLQSSGLYSLSSVVTVPSSSLGTQTYICNVNHKPSDTKVDKKVEPKSCDKTHTCPPCPAPPVAGPSVFLFPPKPKDTLMISRTPEVTCVVVDVKHEDPEVKFNWYVDGVEVHNAKTKPREEEYNSTYRVVSVLTVLHQDWLNGKEYKCKVSNKALPAPIEKTISKAKGQPREPQVYTLPPSREEMTKNQVSLTCDVSGFYPSDIAVEWESDGQPENNYKTTPPVLDSDGSFFLYSKLTVDKSRWEQGDVFSCSVMHEALHNHYTQKSLSLSPGK

SEQ ID NO: 2923 - protein, 479 aa, synthetic construct; identical to SEQ ID NO: 1135
  source 1..479: note = XENP42051 Chain 2 - 1A7[CD28]_H1.14_L1.71_scFv(GKPGS)4_Fc(216)_IgG1_C220S/PVA_/ S267K/S364K/E357Q

SEQ ID NO: 2924 - protein, 214 aa, synthetic construct; identical to SEQ ID NO: 2686
  source 1..214: note = XENP42051 Chain 3 - XPL2-5C11[PD-L2]_L1

SEQ ID NO: 2925 - protein, 454 aa, synthetic construct
  source 1..454: note = XENP42052 Chain 1 - XPL2-8G2[PD-L2]_H2_IgG1_pI(-)_Isosteric_A_/PVA_/S267K/L368D /K370S
QVQLVQSGAEVKKPGSSVKVSCKASGVNFRNYAISWVRQAPGQGLEWMGRIIPVVGKAHYEQKFQGRVTITADKSTTTAYMELSSLRSEDTAVYYCARDGPGIGVAGRGYYFDYWGQGTLVTVSSASTKGPSVFPLAPSSKSTSGGTAALGCLVKDYFPEPVTVSWNSGALTSGVHTFPAVLQSSGLYSLSSVVTVPSSSLGTQTYICNVNHKPSDTKVDKKVEPKSCDKTHTCPPCPAPPVAGPSVFLFPPKPKDTLMISRTPEVTCVVVDVKHEDPEVKFNWYVDGVEVHNAKTKPREEEYNSTYRVVSVLTVLHQDWLNGKEYKCKVSNKALPAPIEKTISKAKGQPREPQVYTLPPSREEMTKNQVSLTCDVSGFYPSDIAVEWESDGQPENNYKTTPPVLDSDGSFFLYSKLTVDKSRWEQGDVFSCSVMHEALHNHYTQKSLSLSPGK

SEQ ID NO: 2926 - protein, 479 aa, synthetic construct; identical to SEQ ID NO: 1135
  source 1..479: note = XENP42052 Chain 2 - 1A7[CD28]_H1.14_L1.71_scFv(GKPGS)4_Fc(216)_IgG1_C220S/PVA_/ S267K/S364K/E357Q

SEQ ID NO: 2927 - protein, 214 aa, synthetic construct; identical to SEQ ID NO: 2686
  source 1..214: note = XENP42052 Chain 3 - XPL2-8G2[PD-L2]_L1

SEQ ID NO: 2928 - protein, 453 aa, synthetic construct
  source 1..453: note = XENP42053 Chain 1 - XPL2-8G5[PD-L2]_H3_IgG1_pI(-)_Isosteric_A_/PVA_/S267K/L368D /K370S
QVQLVQSGAEVKKPGSSVKVSCKASGGSLRNYAISWVRQAPGQGLEWMGRIIYILGIANYAQKFQGRVTITADKSTSTAYMELSSLRSEDTAVYYCARSGSQQLIEGADAFDIWGQGTMVTVSSASTKGPSVFPLAPSSKSTSGGTAALGCLVKDYFPEPVTVSWNSGALTSGVHTFPAVLQSSGLYSLSSVVTVPSSSLGTQTYICNVNHKPSDTKVDKKVEPKSCDKTHTCPPCPAPPVAGPSVFLFPPKPKDTLMISRTPEVTCVVVDVKHEDPEVKFNWYVDGVEVHNAKTKPREEEYNSTYRVVSVLTVLHQDWLNGKEYKCKVSNKALPAPIEKTISKAKGQPREPQVYTLPPSREEMTKNQVSLTCDVSGFYPSDIAVEWESDGQPENNYKTTPPVLDSDGSFFLYSKLTVDKSRWEQGDVFSCSVMHEALHNHYTQKSLSLSPGK

SEQ ID NO: 2929 - protein, 479 aa, synthetic construct; identical to SEQ ID NO: 1135
  source 1..479: note = XENP42053 Chain 2 - 1A7[CD28]_H1.14_L1.71_scFv(GKPGS)4_Fc(216)_IgG1_C220S/PVA_/ S267K/S364K/E357Q

SEQ ID NO: 2930 - protein, 214 aa, synthetic construct; identical to SEQ ID NO: 2686
  source 1..214: note = XENP42053 Chain 3 - XPL2-8G5[PD-L2]_L1

SEQ ID NO: 2931 - protein, 449 aa, synthetic construct
  source 1..449: note = XENP42054 Chain 1 - XPL2-16G11[PD-L2]_H2_IgG1_pI(-)_Isosteric_A_/PVA_/S267K/L36 8D/K370S
QVQLQESGSGLVKPPGTLSLTCAVSGGSISSSNWWSWVRQPPGKGLEWIGEIFHIGSTNYNPSLKSRVTISVDKSKNQFSLKLSSVTAADTAVYYCARVSFGDSYYFDYWGQGTLVTVSSASTKGPSVFPLAPSSKSTSGGTAALGCLVKDYFPEPVTVSWNSGALTSGVHTFPAVLQSSGLYSLSSVVTVPSSSLGTQTYICNVNHKPSDTKVDKKVEPKSCDKTHTCPPCPAPPVAGPSVFLFPPKPKDTLMISRTPEVTCVVVDVKHEDPEVKFNWYVDGVEVHNAKTKPREEEYNSTYRVVSVLTVLHQDWLNGKEYKCKVSNKALPAPIEKTISKAKGQPREPQVYTLPPSREEMTKNQVSLTCDVSGFYPSDIAVEWESDGQPENNYKTTPPVLDSDGSFFLYSKLTVDKSRWEQGDVFSCSVMHEALHNHYTQKSLSLSPGK

SEQ ID NO: 2932 - protein, 479 aa, synthetic construct; identical to SEQ ID NO: 1135
  source 1..479: note = XENP42054 Chain 2 - 1A7[CD28]_H1.14_L1.71_scFv(GKPGS)4_Fc(216)_IgG1_C220S/PVA_/ S267K/S364K/E357Q

SEQ ID NO: 2933 - protein, 214 aa, synthetic construct; identical to SEQ ID NO: 2686
  source 1..214: note = XENP42054 Chain 3 - XPL1-6B1_L1

SEQ ID NO: 2934 - protein, 684 aa, synthetic construct
  source 1..684: note = XENP39995 Chain 1 - 2A3A4.248[PDL1]_H1_(G4A)2_1F12A4.249[PDL2]_H1_IgG1_pI(-)_Is osteric_A_PVA_/S267K/L368D/K370S
QVQLVQSGAEVKKPGSSVKVSCKASGGTFSRYAISWVRQAPGQGLEWMGGIVPIFGKPNYAQKFQGRVTITADESTSTAYMELSSLRSEDTAVYYCARDDWAGPYEWTFDYWGQGTLVTVSSASTKGPSVFPLAPSSKSTSGGTAALGCLVKDYFPEPVTVSWNSGALTSGVHTFPAVLQSSGLYSLSSVVTVPSSSLGTQTYICNVNHKPSNTKVDKKVEPKSCGGGGAGGGGAQVQLVQSGAEVKKPGSSVKVSCKASGGTFSNYVISWVRQAPGQGLEWMGGIIPIFGAVNYAPKFQGRVTITADESTSTAYMELSSLRSEDTAVYYCAREVSRPGTEFDYWGQGTLVTVSSASTKGPSVFPLAPSSKSTSGGTAALGCLVKDYFPEPVTVSWNSGALTSGVHTFPAVLQSSGLYSLSSVVTVPSSSLGTQTYICNVNHKPSNTKVDKKVEPKSCDKTHTCPPCPAPPVAGPSVFLFPPKPKDTLMISRTPEVTCVVVDVKHEDPEVKFNWYVDGVEVHNAKTKPREEEYNSTYRVVSVLTVLHQDWLNGKEYKCKVSNKALPAPIEKTISKAKGQPREPQVYTLPPSREEMTKNQVSLTCDVSGFYPSDIAVEWESDGQPENNYKTTPPVLDSDGSFFLYSKLTVDKSRWEQGDVFSCSVMHEALHNHYTQKSLSLSPGK

SEQ ID NO: 2935 - protein, 479 aa, synthetic construct; identical to SEQ ID NO: 1135
  source 1..479: note = XENP39995 Chain 2 - 1A7[CD28]_H1.14_L1.71_scFv(GKPGS)4_Fc(216)_IgG1_C220S/PVA_/ S267K/S364K/E357Q

SEQ ID NO: 2936 - protein, 214 aa, synthetic construct
  source 1..214: note = XENP39995 Chain 3 - IGKV1-39_L1
DIQMTQSPSSLSASVGDRVTITCRASQSISSYLNWYQQKPGKAPKLLIYAASSLQSGVPSRFSGSGSGTDFTLTISSLQPEDFATYYCQQSYSTPYTFGQGTKLEIKRTVAAPSVFIFPPSDEQLKSGTASVVCLLNNFYPREAKVQWKVDNALQSGNSQESVTEQDSKDSTYSLSSTLTLSKADYEKHKVYACEVTHQGLSSPVTKSFNRGEC

SEQ ID NO: 2937 - protein, 684 aa, synthetic construct
  source 1..684: note = XENP39998 Chain 1 - 1F12A4.249[PDL2]_H1_(G4A)2_2A3A4.248[PDL1]_H1_IgG1_pI(-)_Is osteric_A_PVA_/S267K/L368D/K370S
QVQLVQSGAEVKKPGSSVKVSCKASGGTFSNYVISWVRQAPGQGLEWMGGIIPIFGAVNYAPKFQGRVTITADESTSTAYMELSSLRSEDTAVYYCAREVSRPGTEFDYWGQGTLVTVSSASTKGPSVFPLAPSSKSTSGGTAALGCLVKDYFPEPVTVSWNSGALTSGVHTFPAVLQSSGLYSLSSVVTVPSSSLGTQTYICNVNHKPSNTKVDKKVEPKSCGGGGAGGGGAQVQLVQSGAEVKKPGSSVKVSCKASGGTFSRYAISWVRQAPGQGLEWMGGIVPIFGKPNYAQKFQGRVTITADESTSTAYMELSSLRSEDTAVYYCARDDWAGPYEWTFDYWGQGTLVTVSSASTKGPSVFPLAPSSKSTSGGTAALGCLVKDYFPEPVTVSWNSGALTSGVHTFPAVLQSSGLYSLSSVVTVPSSSLGTQTYICNVNHKPSNTKVDKKVEPKSCDKTHTCPPCPAPPVAGPSVFLFPPKPKDTLMISRTPEVTCVVVDVKHEDPEVKFNWYVDGVEVHNAKTKPREEEYNSTYRVVSVLTVLHQDWLNGKEYKCKVSNKALPAPIEKTISKAKGQPREPQVYTLPPSREEMTKNQVSLTCDVSGFYPSDIAVEWESDGQPENNYKTTPPVLDSDGSFFLYSKLTVDKSRWEQGDVFSCSVMHEALHNHYTQKSLSLSPGK

SEQ ID NO: 2938 - protein, 479 aa, synthetic construct; identical to SEQ ID NO: 1135
  source 1..479: note = XENP39998 Chain 2 - 1A7[CD28]_H1.14_L1.71_scFv(GKPGS)4_Fc(216)_IgG1_C220S/PVA_/ S267K/S364K/E357Q

SEQ ID NO: 2939 - protein, 214 aa, synthetic construct; identical to SEQ ID NO: 2936
  source 1..214: note = XENP39998 Chain 3 - IGKV1-39_L1

SEQ ID NO: 2940 - protein, 691 aa, synthetic construct
  source 1..691: note = XENP42324 Chain 1 - XPL1-13G1[PD-L1]_H1_(G4S)2_XPL2-5C11[PD-L2]_H2_IgG1_pI(-)_I sosteric_A_PVA_/S267K/L368D/K370S
QVQLVESGGGLVKPGGSLRLSCAASGFTFSDYYMSWIRQAPGKGLEWVSYISSSSSYTNYADSVKGRFTISRDNAKNSLYLQMNSLRAEDTAVYYCASHFVILPGAIRPEYFQHWGQGTLVTVSSASTKGPSVFPLAPSSKSTSGGTAALGCLVKDYFPEPVTVSWNSGALTSGVHTFPAVLQSSGLYSLSSVVTVPSSSLGTQTYICNVNHKPSDTKVDKKVEPKSCGGGGSGGGGSQVQLVQSGAEVKKPGSSVKVSCKASGGTFRNYAITWVRQAPGQGLEWMGRIIPILAIANYAQKFQGRVTITADKSTSTVYMELSSLRSEDTAVYYCATDLGIAAAGRAEYFQHWGQGTLVTVSSASTKGPSVFPLAPSSKSTSGGTAALGCLVKDYFPEPVTVSWNSGALTSGVHTFPAVLQSSGLYSLSSVVTVPSSSLGTQTYICNVNHKPSDTKVDKKVEPKSCDKTHTCPPCPAPPVAGPSVFLFPPKPKDTLMISRTPEVTCVVVDVSHEDPEVKFNWYVDGVEVHNAKTKPREEEYNSTYRVVSVLTVLHQDWLNGKEYKCKVSNKALPAPIEKTISKAKGQPREPQVYTLPPSREEMTKNQVSLTCDVSGFYPSDIAVEWESDGQPENNYKTTPPVLDSDGSFFLYSKLTVDKSRWEQGDVFSCSVMHEALHNHYTQKSLSLSPGK

SEQ ID NO: 2941 - protein, 479 aa, synthetic construct
  source 1..479: note = XENP42324 Chain 2 - 1A7[CD28]_H1.14_L1.71_scFv(GKPGS)4_Fc(216)_IgG1_C220S/PVA_/ S267K/S364K/E357Q/H435R/Y436F
EVQLLESGGGLVQPGGSLRLSCAASGFTFSSYYMSWVRQAPGKGLEWVSTISESGDSTYYADSVKGRFTISRDNSKNTLYLQMNSLRAEDTAVYYCAKSGPGLRQVGFDYWGQGTLVTVSSGKPGSGKPGSGKPGSGKPGSDIQMTQSPSSLSASVGDRVTITCRASQSISSYLNWYQQKPGKAPKLLIYAASSLQSGVPSRFSGSGSGTDFTLTISSLQPEDFATYYCQQVYSTPFTFGQGTKLEIKEPKSSDKTHTCPPCPAPPVAGPSVFLFPPKPKDTLMISRTPEVTCVVVDVKHEDPEVKFNWYVDGVEVHNAKTKPREEQYNSTYRVVSVLTVLHQDWLNGKEYKCKVSNKALPAPIEKTISKAKGQPREPQVYTLPPSREQMTKNQVKLTCLVKGFYPSDIAVEWESNGQPENNYKTTPPVLDSDGSFFLYSKLTVDKSRWQQGNVFSCSVMHEALHNRFTQKSLSLSPGK

SEQ ID NO: 2942 - protein, 214 aa, synthetic construct; identical to SEQ ID NO: 2686
  source 1..214: note = XENP42324 Chain 3 - XPL1-6B1_L1

SEQ ID NO: 2943 - protein, 692 aa, synthetic construct
  source 1..692: note = XENP42325 Chain 1 - XPL1-13G1[PD-L1]_H1_(G4S)2_XPL2-8G2[PD-L2]_H2_IgG1_pI(-)_Is osteric_A_PVA_/S267K/L368D/K370S
QVQLVESGGGLVKPGGSLRLSCAASGFTFSDYYMSWIRQAPGKGLEWVSYISSSSSYTNYADSVKGRFTISRDNAKNSLYLQMNSLRAEDTAVYYCASHFVILPGAIRPEYFQHWGQGTLVTVSSASTKGPSVFPLAPSSKSTSGGTAALGCLVKDYFPEPVTVSWNSGALTSGVHTFPAVLQSSGLYSLSSVVTVPSSSLGTQTYICNVNHKPSDTKVDKKVEPKSCGGGGSGGGGSQVQLVQSGAEVKKPGSSVKVSCKASGVNFRNYAISWVRQAPGQGLEWMGRIIPVVGKAHYEQKFQGRVTITADKSTTTAYMELSSLRSEDTAVYYCARDGPGIGVAGRGYYFDYWGQGTLVTVSSASTKGPSVFPLAPSSKSTSGGTAALGCLVKDYFPEPVTVSWNSGALTSGVHTFPAVLQSSGLYSLSSVVTVPSSSLGTQTYICNVNHKPSDTKVDKKVEPKSCDKTHTCPPCPAPPVAGPSVFLFPPKPKDTLMISRTPEVTCVVVDVSHEDPEVKFNWYVDGVEVHNAKTKPREEEYNSTYRVVSVLTVLHQDWLNGKEYKCKVSNKALPAPIEKTISKAKGQPREPQVYTLPPSREEMTKNQVSLTCDVSGFYPSDIAVEWESDGQPENNYKTTPPVLDSDGSFFLYSKLTVDKSRWEQGDVFSCSVMHEALHNHYTQKSLSLSPGK

SEQ ID NO: 2944 - protein, 479 aa, synthetic construct; identical to SEQ ID NO: 2941
  source 1..479: note = XENP42325 Chain 2 - 1A7[CD28]_H1.14_L1.71_scFv(GKPGS)4_Fc(216)_IgG1_C220S/PVA_/ S267K/S364K/E357Q/H435R/Y436F

SEQ ID NO: 2945 - protein, 214 aa, synthetic construct; identical to SEQ ID NO: 2686
  source 1..214: note = XENP42325 Chain 3 - XPL1-6B1_L1

SEQ ID NO: 2946 - protein, 691 aa, synthetic construct
  source 1..691: note = XENP42326 Chain 1 - XPL1-13G1[PD-L1]_H1_(G4S)2_XPL2-8G5[PD-L2]_H3_IgG1_pI(-)_Is osteric_A_PVA_/S267K/L368D/K370S
QVQLVESGGGLVKPGGSLRLSCAASGFTFSDYYMSWIRQAPGKGLEWVSYISSSSSYTNYADSVKGRFTISRDNAKNSLYLQMNSLRAEDTAVYYCASHFVILPGAIRPEYFQHWGQGTLVTVSSASTKGPSVFPLAPSSKSTSGGTAALGCLVKDYFPEPVTVSWNSGALTSGVHTFPAVLQSSGLYSLSSVVTVPSSSLGTQTYICNVNHKPSDTKVDKKVEPKSCGGGGSGGGGSQVQLVQSGAEVKKPGSSVKVSCKASGGSLRNYAISWVRQAPGQGLEWMGRIIYILGIANYAQKFQGRVTITADKSTSTAYMELSSLRSEDTAVYYCARSGSQQLIEGADAFDIWGQGTMVTVSSASTKGPSVFPLAPSSKSTSGGTAALGCLVKDYFPEPVTVSWNSGALTSGVHTFPAVLQSSGLYSLSSVVTVPSSSLGTQTYICNVNHKPSDTKVDKKVEPKSCDKTHTCPPCPAPPVAGPSVFLFPPKPKDTLMISRTPEVTCVVVDVSHEDPEVKFNWYVDGVEVHNAKTKPREEEYNSTYRVVSVLTVLHQDWLNGKEYKCKVSNKALPAPIEKTISKAKGQPREPQVYTLPPSREEMTKNQVSLTCDVSGFYPSDIAVEWESDGQPENNYKTTPPVLDSDGSFFLYSKLTVDKSRWEQGDVFSCSVMHEALHNHYTQKSLSLSPGK

SEQ ID NO: 2947 - protein, 479 aa, synthetic construct; identical to SEQ ID NO: 2941
  source 1..479: note = XENP42326 Chain 2 - 1A7[CD28]_H1.14_L1.71_scFv(GKPGS)4_Fc(216)_IgG1_C220S/PVA_/ S267K/S364K/E357Q/H435R/Y436F

SEQ ID NO: 2948 - protein, 214 aa, synthetic construct; identical to SEQ ID NO: 2686
  source 1..214: note = XENP42326 Chain 3 - XPL1-6B1_L1

SEQ ID NO: 2949 - protein, 687 aa, synthetic construct
  source 1..687: note = XENP42327 Chain 1 - XPL1-13G1[PD-L1]_H1_(G4S)2_XPL2-16G11[PD-L2]_H2_IgG1_pI(-)_ Isosteric_A_PVA_/S267K/L368D/K370S
QVQLVESGGGLVKPGGSLRLSCAASGFTFSDYYMSWIRQAPGKGLEWVSYISSSSSYTNYADSVKGRFTISRDNAKNSLYLQMNSLRAEDTAVYYCASHFVILPGAIRPEYFQHWGQGTLVTVSSASTKGPSVFPLAPSSKSTSGGTAALGCLVKDYFPEPVTVSWNSGALTSGVHTFPAVLQSSGLYSLSSVVTVPSSSLGTQTYICNVNHKPSDTKVDKKVEPKSCGGGGSGGGGSQVQLQESGSGLVKPPGTLSLTCAVSGGSISSSNWWSWVRQPPGKGLEWIGEIFHIGSTNYNPSLKSRVTISVDKSKNQFSLKLSSVTAADTAVYYCARVSFGDSYYFDYWGQGTLVTVSSASTKGPSVFPLAPSSKSTSGGTAALGCLVKDYFPEPVTVSWNSGALTSGVHTFPAVLQSSGLYSLSSVVTVPSSSLGTQTYICNVNHKPSDTKVDKKVEPKSCDKTHTCPPCPAPPVAGPSVFLFPPKPKDTLMISRTPEVTCVVVDVSHEDPEVKFNWYVDGVEVHNAKTKPREEEYNSTYRVVSVLTVLHQDWLNGKEYKCKVSNKALPAPIEKTISKAKGQPREPQVYTLPPSREEMTKNQVSLTCDVSGFYPSDIAVEWESDGQPENNYKTTPPVLDSDGSFFLYSKLTVDKSRWEQGDVFSCSVMHEALHNHYTQKSLSLSPGK

SEQ ID NO: 2950 - protein, 479 aa, synthetic construct; identical to SEQ ID NO: 2941
  source 1..479: note = XENP42327 Chain 2 - 1A7[CD28]_H1.14_L1.71_scFv(GKPGS)4_Fc(216)_IgG1_C220S/PVA_/ S267K/S364K/E357Q/H435R/Y436F

SEQ ID NO: 2951 - protein, 214 aa, synthetic construct; identical to SEQ ID NO: 2686
  source 1..214: note = XENP42327 Chain 3 - XPL1-6B1_L1

SEQ ID NO: 2952 - protein, 687 aa, synthetic construct
  source 1..687: note = XENP42328 Chain 1 - XPL1-13G7[PD-L1]_H2_(G4S)2_XPL2-5C11[PD-L2]_H2_IgG1_pI(-)_I sosteric_A_PVA_/S267K/L368D/K370S
QVQLQESGPGLVKPSETLSLTCTVSGGSISSYFWSWIRQPPGKGLEWIGYIYYSGSTNYNPSLKSRVTISVDTSKNQFSLKLSSVTAADTAVYYCARGPLIQLWLPPFDYWGQGTLVTVSSASTKGPSVFPLAPSSKSTSGGTAALGCLVKDYFPEPVTVSWNSGALTSGVHTFPAVLQSSGLYSLSSVVTVPSSSLGTQTYICNVNHKPSDTKVDKKVEPKSCGGGGSGGGGSQVQLVQSGAEVKKPGSSVKVSCKASGGTFRNYAITWVRQAPGQGLEWMGRIIPILAIANYAQKFQGRVTITADKSTSTVYMELSSLRSEDTAVYYCATDLGIAAAGRAEYFQHWGQGTLVTVSSASTKGPSVFPLAPSSKSTSGGTAALGCLVKDYFPEPVTVSWNSGALTSGVHTFPAVLQSSGLYSLSSVVTVPSSSLGTQTYICNVNHKPSDTKVDKKVEPKSCDKTHTCPPCPAPPVAGPSVFLFPPKPKDTLMISRTPEVTCVVVDVSHEDPEVKFNWYVDGVEVHNAKTKPREEEYNSTYRVVSVLTVLHQDWLNGKEYKCKVSNKALPAPIEKTISKAKGQPREPQVYTLPPSREEMTKNQVSLTCDVSGFYPSDIAVEWESDGQPENNYKTTPPVLDSDGSFFLYSKLTVDKSRWEQGDVFSCSVMHEALHNHYTQKSLSLSPGK

SEQ ID NO: 2953 - protein, 479 aa, synthetic construct; identical to SEQ ID NO: 2941
  source 1..479: note = XENP42328 Chain 2 - 1A7[CD28]_H1.14_L1.71_scFv(GKPGS)4_Fc(216)_IgG1_C220S/PVA_/ S267K/S364K/E357Q/H435R/Y436F

SEQ ID NO: 2954 - protein, 214 aa, synthetic construct; identical to SEQ ID NO: 2686
  source 1..214: note = XENP42328 Chain 3 - XPL1-6B1_L1

SEQ ID NO: 2955 - protein, 688 aa, synthetic construct
  source 1..688: note = XENP42329 Chain 1 - XPL1-13G7[PD-L1]_H2_(G4S)2_XPL2-8G2[PD-L2]_H2_IgG1_pI(-)_Is osteric_A_PVA_/S267K/L368D/K370S
QVQLQESGPGLVKPSETLSLTCTVSGGSISSYFWSWIRQPPGKGLEWIGYIYYSGSTNYNPSLKSRVTISVDTSKNQFSLKLSSVTAADTAVYYCARGPLIQLWLPPFDYWGQGTLVTVSSASTKGPSVFPLAPSSKSTSGGTAALGCLVKDYFPEPVTVSWNSGALTSGVHTFPAVLQSSGLYSLSSVVTVPSSSLGTQTYICNVNHKPSDTKVDKKVEPKSCGGGGSGGGGSQVQLVQSGAEVKKPGSSVKVSCKASGVNFRNYAISWVRQAPGQGLEWMGRIIPVVGKAHYEQKFQGRVTITADKSTTTAYMELSSLRSEDTAVYYCARDGPGIGVAGRGYYFDYWGQGTLVTVSSASTKGPSVFPLAPSSKSTSGGTAALGCLVKDYFPEPVTVSWNSGALTSGVHTFPAVLQSSGLYSLSSVVTVPSSSLGTQTYICNVNHKPSDTKVDKKVEPKSCDKTHTCPPCPAPPVAGPSVFLFPPKPKDTLMISRTPEVTCVVVDVSHEDPEVKFNWYVDGVEVHNAKTKPREEEYNSTYRVVSVLTVLHQDWLNGKEYKCKVSNKALPAPIEKTISKAKGQPREPQVYTLPPSREEMTKNQVSLTCDVSGFYPSDIAVEWESDGQPENNYKTTPPVLDSDGSFFLYSKLTVDKSRWEQGDVFSCSVMHEALHNHYTQKSLSLSPGK

SEQ ID NO: 2956 - protein, 479 aa, synthetic construct; identical to SEQ ID NO: 2941
  source 1..479: note = XENP42329 Chain 2 - 1A7[CD28]_H1.14_L1.71_scFv(GKPGS)4_Fc(216)_IgG1_C220S/PVA_/ S267K/S364K/E357Q/H435R/Y436F

SEQ ID NO: 2957 - protein, 214 aa, synthetic construct; identical to SEQ ID NO: 2686
  source 1..214: note = XENP42329 Chain 3 - XPL1-6B1_L1

SEQ ID NO: 2958 - protein, 687 aa, synthetic construct
  source 1..687: note = XENP42330 Chain 1 - XPL1-13G7[PD-L1]_H2_(G4S)2_XPL2-8G5[PD-L2]_H3_IgG1_pI(-)_Is osteric_A_PVA_/S267K/L368D/K370S
QVQLQESGPGLVKPSETLSLTCTVSGGSISSYFWSWIRQPPGKGLEWIGYIYYSGSTNYNPSLKSRVTISVDTSKNQFSLKLSSVTAADTAVYYCARGPLIQLWLPPFDYWGQGTLVTVSSASTKGPSVFPLAPSSKSTSGGTAALGCLVKDYFPEPVTVSWNSGALTSGVHTFPAVLQSSGLYSLSSVVTVPSSSLGTQTYICNVNHKPSDTKVDKKVEPKSCGGGGSGGGGSQVQLVQSGAEVKKPGSSVKVSCKASGGSLRNYAISWVRQAPGQGLEWMGRIIYILGIANYAQKFQGRVTITADKSTSTAYMELSSLRSEDTAVYYCARSGSQQLIEGADAFDIWGQGTMVTVSSASTKGPSVFPLAPSSKSTSGGTAALGCLVKDYFPEPVTVSWNSGALTSGVHTFPAVLQSSGLYSLSSVVTVPSSSLGTQTYICNVNHKPSDTKVDKKVEPKSCDKTHTCPPCPAPPVAGPSVFLFPPKPKDTLMISRTPEVTCVVVDVSHEDPEVKFNWYVDGVEVHNAKTKPREEEYNSTYRVVSVLTVLHQDWLNGKEYKCKVSNKALPAPIEKTISKAKGQPREPQVYTLPPSREEMTKNQVSLTCDVSGFYPSDIAVEWESDGQPENNYKTTPPVLDSDGSFFLYSKLTVDKSRWEQGDVFSCSVMHEALHNHYTQKSLSLSPGK

SEQ ID NO: 2959 - protein, 479 aa, synthetic construct; identical to SEQ ID NO: 2941
  source 1..479: note = XENP42330 Chain 2 - 1A7[CD28]_H1.14_L1.71_scFv(GKPGS)4_Fc(216)_IgG1_C220S/PVA_/ S267K/S364K/E357Q/H435R/Y436F

SEQ ID NO: 2960 - protein, 214 aa, synthetic construct; identical to SEQ ID NO: 2686
  source 1..214: note = XENP42330 Chain 3 - XPL1-6B1_L1

SEQ ID NO: 2961 - protein, 683 aa, synthetic construct
  source 1..683: note = XENP42331 Chain 1 - XPL1-13G7[PD-L1]_H2_(G4S)2_XPL2-16G11[PD-L2]_H2_IgG1_pI(-)_ Isosteric_A_PVA_/S267K/L368D/K370S
QVQLQESGPGLVKPSETLSLTCTVSGGSISSYFWSWIRQPPGKGLEWIGYIYYSGSTNYNPSLKSRVTISVDTSKNQFSLKLSSVTAADTAVYYCARGPLIQLWLPPFDYWGQGTLVTVSSASTKGPSVFPLAPSSKSTSGGTAALGCLVKDYFPEPVTVSWNSGALTSGVHTFPAVLQSSGLYSLSSVVTVPSSSLGTQTYICNVNHKPSDTKVDKKVEPKSCGGGGSGGGGSQVQLQESGSGLVKPPGTLSLTCAVSGGSISSSNWWSWVRQPPGKGLEWIGEIFHIGSTNYNPSLKSRVTISVDKSKNQFSLKLSSVTAADTAVYYCARVSFGDSYYFDYWGQGTLVTVSSASTKGPSVFPLAPSSKSTSGGTAALGCLVKDYFPEPVTVSWNSGALTSGVHTFPAVLQSSGLYSLSSVVTVPSSSLGTQTYICNVNHKPSDTKVDKKVEPKSCDKTHTCPPCPAPPVAGPSVFLFPPKPKDTLMISRTPEVTCVVVDVSHEDPEVKFNWYVDGVEVHNAKTKPREEEYNSTYRVVSVLTVLHQDWLNGKEYKCKVSNKALPAPIEKTISKAKGQPREPQVYTLPPSREEMTKNQVSLTCDVSGFYPSDIAVEWESDGQPENNYKTTPPVLDSDGSFFLYSKLTVDKSRWEQGDVFSCSVMHEALHNHYTQKSLSLSPGK

SEQ ID NO: 2962 - protein, 479 aa, synthetic construct; identical to SEQ ID NO: 2941
  source 1..479: note = XENP42331 Chain 2 - 1A7[CD28]_H1.14_L1.71_scFv(GKPGS)4_Fc(216)_IgG1_C220S/PVA_/ S267K/S364K/E357Q/H435R/Y436F

SEQ ID NO: 2963 - protein, 214 aa, synthetic construct; identical to SEQ ID NO: 2686
  source 1..214: note = XENP42331 Chain 3 - XPL1-6B1_L1

SEQ ID NO: 2964 - protein, 691 aa, synthetic construct
  source 1..691: note = XENP42332 Chain 1 - XPL2-5C11[PD-L2]_H2_(G4S)2_XPL1-13G1[PD-L1]_H1_IgG1_pI(-)_I sosteric_A_PVA_/S267K/L368D/K370S
QVQLVQSGAEVKKPGSSVKVSCKASGGTFRNYAITWVRQAPGQGLEWMGRIIPILAIANYAQKFQGRVTITADKSTSTVYMELSSLRSEDTAVYYCATDLGIAAAGRAEYFQHWGQGTLVTVSSASTKGPSVFPLAPSSKSTSGGTAALGCLVKDYFPEPVTVSWNSGALTSGVHTFPAVLQSSGLYSLSSVVTVPSSSLGTQTYICNVNHKPSDTKVDKKVEPKSCGGGGSGGGGSQVQLVESGGGLVKPGGSLRLSCAASGFTFSDYYMSWIRQAPGKGLEWVSYISSSSSYTNYADSVKGRFTISRDNAKNSLYLQMNSLRAEDTAVYYCASHFVILPGAIRPEYFQHWGQGTLVTVSSASTKGPSVFPLAPSSKSTSGGTAALGCLVKDYFPEPVTVSWNSGALTSGVHTFPAVLQSSGLYSLSSVVTVPSSSLGTQTYICNVNHKPSDTKVDKKVEPKSCDKTHTCPPCPAPPVAGPSVFLFPPKPKDTLMISRTPEVTCVVVDVSHEDPEVKFNWYVDGVEVHNAKTKPREEEYNSTYRVVSVLTVLHQDWLNGKEYKCKVSNKALPAPIEKTISKAKGQPREPQVYTLPPSREEMTKNQVSLTCDVSGFYPSDIAVEWESDGQPENNYKTTPPVLDSDGSFFLYSKLTVDKSRWEQGDVFSCSVMHEALHNHYTQKSLSLSPGK

SEQ ID NO: 2965 - protein, 479 aa, synthetic construct; identical to SEQ ID NO: 2941
  source 1..479: note = XENP42332 Chain 2 - 1A7[CD28]_H1.14_L1.71_scFv(GKPGS)4_Fc(216)_IgG1_C220S/PVA_/ S267K/S364K/E357Q/H435R/Y436F

SEQ ID NO: 2966 - protein, 214 aa, synthetic construct; identical to SEQ ID NO: 2686
  source 1..214: note = XENP42332 Chain 3 - XPL1-6B1_L1

SEQ ID NO: 2967 - protein, 687 aa, synthetic construct
  source 1..687: note = XENP42333 Chain 1 - XPL2-5C11[PD-L2]_H2_(G4S)2_XPL1-13G7[PD-L1]_H2_IgG1_pI(-)_I sosteric_A_PVA_/S267K/L368D/K370S
QVQLVQSGAEVKKPGSSVKVSCKASGGTFRNYAITWVRQAPGQGLEWMGRIIPILAIANYAQKFQGRVTITADKSTSTVYMELSSLRSEDTAVYYCATDLGIAAAGRAEYFQHWGQGTLVTVSSASTKGPSVFPLAPSSKSTSGGTAALGCLVKDYFPEPVTVSWNSGALTSGVHTFPAVLQSSGLYSLSSVVTVPSSSLGTQTYICNVNHKPSDTKVDKKVEPKSCGGGGSGGGGSQVQLQESGPGLVKPSETLSLTCTVSGGSISSYFWSWIRQPPGKGLEWIGYIYYSGSTNYNPSLKSRVTISVDTSKNQFSLKLSSVTAADTAVYYCARGPLIQLWLPPFDYWGQGTLVTVSSASTKGPSVFPLAPSSKSTSGGTAALGCLVKDYFPEPVTVSWNSGALTSGVHTFPAVLQSSGLYSLSSVVTVPSSSLGTQTYICNVNHKPSDTKVDKKVEPKSCDKTHTCPPCPAPPVAGPSVFLFPPKPKDTLMISRTPEVTCVVVDVSHEDPEVKFNWYVDGVEVHNAKTKPREEEYNSTYRVVSVLTVLHQDWLNGKEYKCKVSNKALPAPIEKTISKAKGQPREPQVYTLPPSREEMTKNQVSLTCDVSGFYPSDIAVEWESDGQPENNYKTTPPVLDSDGSFFLYSKLTVDKSRWEQGDVFSCSVMHEALHNHYTQKSLSLSPGK

SEQ ID NO: 2968 - protein, 479 aa, synthetic construct; identical to SEQ ID NO: 2941
  source 1..479: note = XENP42333 Chain 2 - 1A7[CD28]_H1.14_L1.71_scFv(GKPGS)4_Fc(216)_IgG1_C220S/PVA_/ S267K/S364K/E357Q/H435R/Y436F

SEQ ID NO: 2969 - protein, 214 aa, synthetic construct; identical to SEQ ID NO: 2686
  source 1..214: note = XENP42333 Chain 3 - XPL1-6B1_L1

SEQ ID NO: 2970 - protein, 692 aa, synthetic construct
  source 1..692: note = XENP42334 Chain 1 - XPL2-8G2[PD-L2]_H2_(G4S)2_XPL1-13G1[PD-L1]_H1_IgG1_pI(-)_Is osteric_A_PVA_/S267K/L368D/K370S
QVQLVQSGAEVKKPGSSVKVSCKASGVNFRNYAISWVRQAPGQGLEWMGRIIPVVGKAHYEQKFQGRVTITADKSTTTAYMELSSLRSEDTAVYYCARDGPGIGVAGRGYYFDYWGQGTLVTVSSASTKGPSVFPLAPSSKSTSGGTAALGCLVKDYFPEPVTVSWNSGALTSGVHTFPAVLQSSGLYSLSSVVTVPSSSLGTQTYICNVNHKPSDTKVDKKVEPKSCGGGGSGGGGSQVQLVESGGGLVKPGGSLRLSCAASGFTFSDYYMSWIRQAPGKGLEWVSYISSSSSYTNYADSVKGRFTISRDNAKNSLYLQMNSLRAEDTAVYYCASHFVILPGAIRPEYFQHWGQGTLVTVSSASTKGPSVFPLAPSSKSTSGGTAALGCLVKDYFPEPVTVSWNSGALTSGVHTFPAVLQSSGLYSLSSVVTVPSSSLGTQTYICNVNHKPSDTKVDKKVEPKSCDKTHTCPPCPAPPVAGPSVFLFPPKPKDTLMISRTPEVTCVVVDVSHEDPEVKFNWYVDGVEVHNAKTKPREEEYNSTYRVVSVLTVLHQDWLNGKEYKCKVSNKALPAPIEKTISKAKGQPREPQVYTLPPSREEMTKNQVSLTCDVSGFYPSDIAVEWESDGQPENNYKTTPPVLDSDGSFFLYSKLTVDKSRWEQGDVFSCSVMHEALHNHYTQKSLSLSPGK

SEQ ID NO: 2971 - protein, 479 aa, synthetic construct; identical to SEQ ID NO: 2941
  source 1..479: note = XENP42334 Chain 2 - 1A7[CD28]_H1.14_L1.71_scFv(GKPGS)4_Fc(216)_IgG1_C220S/PVA_/ S267K/S364K/E357Q/H435R/Y436F

SEQ ID NO: 2972 - protein, 214 aa, synthetic construct; identical to SEQ ID NO: 2686
  source 1..214: note = XENP42334 Chain 3 - XPL1-6B1_L1

SEQ ID NO: 2973 - protein, 688 aa, synthetic construct
  source 1..688: note = XENP42335 Chain 1 - XPL2-8G2[PD-L2]_H2_(G4S)2_XPL1-13G7[PD-L1]_H2_IgG1_pI(-)_Is osteric_A_PVA_/S267K/L368D/K370S
QVQLVQSGAEVKKPGSSVKVSCKASGVNFRNYAISWVRQAPGQGLEWMGRIIPVVGKAHYEQKFQGRVTITADKSTTTAYMELSSLRSEDTAVYYCARDGPGIGVAGRGYYFDYWGQGTLVTVSSASTKGPSVFPLAPSSKSTSGGTAALGCLVKDYFPEPVTVSWNSGALTSGVHTFPAVLQSSGLYSLSSVVTVPSSSLGTQTYICNVNHKPSDTKVDKKVEPKSCGGGGSGGGGSQVQLQESGPGLVKPSETLSLTCTVSGGSISSYFWSWIRQPPGKGLEWIGYIYYSGSTNYNPSLKSRVTISVDTSKNQFSLKLSSVTAADTAVYYCARGPLIQLWLPPFDYWGQGTLVTVSSASTKGPSVFPLAPSSKSTSGGTAALGCLVKDYFPEPVTVSWNSGALTSGVHTFPAVLQSSGLYSLSSVVTVPSSSLGTQTYICNVNHKPSDTKVDKKVEPKSCDKTHTCPPCPAPPVAGPSVFLFPPKPKDTLMISRTPEVTCVVVDVSHEDPEVKFNWYVDGVEVHNAKTKPREEEYNSTYRVVSVLTVLHQDWLNGKEYKCKVSNKALPAPIEKTISKAKGQPREPQVYTLPPSREEMTKNQVSLTCDVSGFYPSDIAVEWESDGQPENNYKTTPPVLDSDGSFFLYSKLTVDKSRWEQGDVFSCSVMHEALHNHYTQKSLSLSPGK

SEQ ID NO: 2974 - protein, 479 aa, synthetic construct; identical to SEQ ID NO: 2941
  source 1..479: note = XENP42335 Chain 2 - 1A7[CD28]_H1.14_L1.71_scFv(GKPGS)4_Fc(216)_IgG1_C220S/PVA_/ S267K/S364K/E357Q/H435R/Y436F

SEQ ID NO: 2975 - protein, 214 aa, synthetic construct; identical to SEQ ID NO: 2686
  source 1..214: note = XENP42335 Chain 3 - XPL1-6B1_L1

SEQ ID NO: 2976 - protein, 691 aa, synthetic construct
  source 1..691: note = XENP42336 Chain 1 - XPL2-8G5[PD-L2]_H3_(G4S)2_XPL1-13G1[PD-L1]_H1_IgG1_pI(-)_Is osteric_A_PVA_/S267K/L368D/K370S
QVQLVQSGAEVKKPGSSVKVSCKASGGSLRNYAISWVRQAPGQGLEWMGRIIYILGIANYAQKFQGRVTITADKSTSTAYMELSSLRSEDTAVYYCARSGSQQLIEGADAFDIWGQGTMVTVSSASTKGPSVFPLAPSSKSTSGGTAALGCLVKDYFPEPVTVSWNSGALTSGVHTFPAVLQSSGLYSLSSVVTVPSSSLGTQTYICNVNHKPSDTKVDKKVEPKSCGGGGSGGGGSQVQLVESGGGLVKPGGSLRLSCAASGFTFSDYYMSWIRQAPGKGLEWVSYISSSSSYTNYADSVKGRFTISRDNAKNSLYLQMNSLRAEDTAVYYCASHFVILPGAIRPEYFQHWGQGTLVTVSSASTKGPSVFPLAPSSKSTSGGTAALGCLVKDYFPEPVTVSWNSGALTSGVHTFPAVLQSSGLYSLSSVVTVPSSSLGTQTYICNVNHKPSDTKVDKKVEPKSCDKTHTCPPCPAPPVAGPSVFLFPPKPKDTLMISRTPEVTCVVVDVSHEDPEVKFNWYVDGVEVHNAKTKPREEEYNSTYRVVSVLTVLHQDWLNGKEYKCKVSNKALPAPIEKTISKAKGQPREPQVYTLPPSREEMTKNQVSLTCDVSGFYPSDIAVEWESDGQPENNYKTTPPVLDSDGSFFLYSKLTVDKSRWEQGDVFSCSVMHEALHNHYTQKSLSLSPGK

SEQ ID NO: 2977 - protein, 479 aa, synthetic construct; identical to SEQ ID NO: 2941
  source 1..479: note = XENP42336 Chain 2 - 1A7[CD28]_H1.14_L1.71_scFv(GKPGS)4_Fc(216)_IgG1_C220S/PVA_/ S267K/S364K/E357Q/H435R/Y436F

SEQ ID NO: 2978 - protein, 214 aa, synthetic construct; identical to SEQ ID NO: 2686
  source 1..214: note = XENP42336 Chain 3 - XPL1-6B1_L1

SEQ ID NO: 2979 - protein, 687 aa, synthetic construct
  source 1..687: note = XENP42337 Chain 1 - XPL2-8G5[PD-L2]_H3_(G4S)2_XPL1-13G7[PD-L1]_H2_IgG1_pI(-)_Is osteric_A_PVA_/S267K/L368D/K370S
QVQLVQSGAEVKKPGSSVKVSCKASGGSLRNYAISWVRQAPGQGLEWMGRIIYILGIANYAQKFQGRVTITADKSTSTAYMELSSLRSEDTAVYYCARSGSQQLIEGADAFDIWGQGTMVTVSSASTKGPSVFPLAPSSKSTSGGTAALGCLVKDYFPEPVTVSWNSGALTSGVHTFPAVLQSSGLYSLSSVVTVPSSSLGTQTYICNVNHKPSDTKVDKKVEPKSCGGGGSGGGGSQVQLQESGPGLVKPSETLSLTCTVSGGSISSYFWSWIRQPPGKGLEWIGYIYYSGSTNYNPSLKSRVTISVDTSKNQFSLKLSSVTAADTAVYYCARGPLIQLWLPPFDYWGQGTLVTVSSASTKGPSVFPLAPSSKSTSGGTAALGCLVKDYFPEPVTVSWNSGALTSGVHTFPAVLQSSGLYSLSSVVTVPSSSLGTQTYICNVNHKPSDTKVDKKVEPKSCDKTHTCPPCPAPPVAGPSVFLFPPKPKDTLMISRTPEVTCVVVDVSHEDPEVKFNWYVDGVEVHNAKTKPREEEYNSTYRVVSVLTVLHQDWLNGKEYKCKVSNKALPAPIEKTISKAKGQPREPQVYTLPPSREEMTKNQVSLTCDVSGFYPSDIAVEWESDGQPENNYKTTPPVLDSDGSFFLYSKLTVDKSRWEQGDVFSCSVMHEALHNHYTQKSLSLSPGK

SEQ ID NO: 2980 - protein, 479 aa, synthetic construct; identical to SEQ ID NO: 2941
  source 1..479: note = XENP42337 Chain 2 - 1A7[CD28]_H1.14_L1.71_scFv(GKPGS)4_Fc(216)_IgG1_C220S/PVA_/ S267K/S364K/E357Q/H435R/Y436F

SEQ ID NO: 2981 - protein, 214 aa, synthetic construct; identical to SEQ ID NO: 2686
  source 1..214: note = XENP42337 Chain 3 - XPL1-6B1_L1

SEQ ID NO: 2982 - protein, 687 aa, synthetic construct
  source 1..687: note = XENP42338 Chain 1 - XPL2-16G11[PD-L2]_H2_(G4S)2_XPL1-13G1[PD-L1]_H1_IgG1_pI(-)_ Isosteric_A_PVA_/S267K/L368D/K370S
QVQLQESGSGLVKPPGTLSLTCAVSGGSISSSNWWSWVRQPPGKGLEWIGEIFHIGSTNYNPSLKSRVTISVDKSKNQFSLKLSSVTAADTAVYYCARVSFGDSYYFDYWGQGTLVTVSSASTKGPSVFPLAPSSKSTSGGTAALGCLVKDYFPEPVTVSWNSGALTSGVHTFPAVLQSSGLYSLSSVVTVPSSSLGTQTYICNVNHKPSDTKVDKKVEPKSCGGGGSGGGGSQVQLVESGGGLVKPGGSLRLSCAASGFTFSDYYMSWIRQAPGKGLEWVSYISSSSSYTNYADSVKGRFTISRDNAKNSLYLQMNSLRAEDTAVYYCASHFVILPGAIRPEYFQHWGQGTLVTVSSASTKGPSVFPLAPSSKSTSGGTAALGCLVKDYFPEPVTVSWNSGALTSGVHTFPAVLQSSGLYSLSSVVTVPSSSLGTQTYICNVNHKPSDTKVDKKVEPKSCDKTHTCPPCPAPPVAGPSVFLFPPKPKDTLMISRTPEVTCVVVDVSHEDPEVKFNWYVDGVEVHNAKTKPREEEYNSTYRVVSVLTVLHQDWLNGKEYKCKVSNKALPAPIEKTISKAKGQPREPQVYTLPPSREEMTKNQVSLTCDVSGFYPSDIAVEWESDGQPENNYKTTPPVLDSDGSFFLYSKLTVDKSRWEQGDVFSCSVMHEALHNHYTQKSLSLSPGK

SEQ ID NO: 2983 - protein, 479 aa, synthetic construct; identical to SEQ ID NO: 2941
  source 1..479: note = XENP42338 Chain 2 - 1A7[CD28]_H1.14_L1.71_scFv(GKPGS)4_Fc(216)_IgG1_C220S/PVA_/ S267K/S364K/E357Q/H435R/Y436F

SEQ ID NO: 2984 - protein, 214 aa, synthetic construct; identical to SEQ ID NO: 2686
  source 1..214: note = XENP42338 Chain 3 - XPL1-6B1_L1

SEQ ID NO: 2985 - protein, 683 aa, synthetic construct
  source 1..683: note = XENP42339 Chain 1 - XPL2-16G11[PD-L2]_H2_(G4S)2_XPL1-13G7[PD-L1]_H2_IgG1_pI(-)_ Isosteric_A_PVA_/S267K/L368D/K370S
QVQLQESGSGLVKPPGTLSLTCAVSGGSISSSNWWSWVRQPPGKGLEWIGEIFHIGSTNYNPSLKSRVTISVDKSKNQFSLKLSSVTAADTAVYYCARVSFGDSYYFDYWGQGTLVTVSSASTKGPSVFPLAPSSKSTSGGTAALGCLVKDYFPEPVTVSWNSGALTSGVHTFPAVLQSSGLYSLSSVVTVPSSSLGTQTYICNVNHKPSDTKVDKKVEPKSCGGGGSGGGGSQVQLQESGPGLVKPSETLSLTCTVSGGSISSYFWSWIRQPPGKGLEWIGYIYYSGSTNYNPSLKSRVTISVDTSKNQFSLKLSSVTAADTAVYYCARGPLIQLWLPPFDYWGQGTLVTVSSASTKGPSVFPLAPSSKSTSGGTAALGCLVKDYFPEPVTVSWNSGALTSGVHTFPAVLQSSGLYSLSSVVTVPSSSLGTQTYICNVNHKPSDTKVDKKVEPKSCDKTHTCPPCPAPPVAGPSVFLFPPKPKDTLMISRTPEVTCVVVDVSHEDPEVKFNWYVDGVEVHNAKTKPREEEYNSTYRVVSVLTVLHQDWLNGKEYKCKVSNKALPAPIEKTISKAKGQPREPQVYTLPPSREEMTKNQVSLTCDVSGFYPSDIAVEWESDGQPENNYKTTPPVLDSDGSFFLYSKLTVDKSRWEQGDVFSCSVMHEALHNHYTQKSLSLSPGK

SEQ ID NO: 2986 - protein, 479 aa, synthetic construct; identical to SEQ ID NO: 2941
  source 1..479: note = XENP42339 Chain 2 - 1A7[CD28]_H1.14_L1.71_scFv(GKPGS)4_Fc(216)_IgG1_C220S/PVA_/ S267K/S364K/E357Q/H435R/Y436F

SEQ ID NO: 2987 - protein, 214 aa, synthetic construct; identical to SEQ ID NO: 2686
  source 1..214: note = XENP42339 Chain 3 - XPL1-6B1_L1

SEQ ID NO: 2988 - protein, 683 aa, synthetic construct
  source 1..683: note = XENP43461 Chain 1 - XPL2-16G11[PD-L2]_H3.7_(G4A)2_XPL1-13G7[PD-L1]_H2.18_IgG1_p I(-)_Isosteric_A_PVA_/S267K/L368D/K370S/M428L/N434S
QVQLQESGPGLVKPSGTLSLTCAVSGGSISSSNWWGWVRQPPGKGLEWIGEIFHIGLTNYNPSLKSRVTISVDKSKNQFSLKLSSVTAADTAVYYCARVSFGDSYYFDYWGQGTLVTVSSASTKGPSVFPLAPSSKSTSGGTAALGCLVKDYFPEPVTVSWNSGALTSGVHTFPAVLQSSGLYSLSSVVTVPSSSLGTQTYICNVNHKPSDTKVDKKVEPKSCGGGGAGGGGAQVQLQESGPGLVKPSETLSLTCTVSGGSISGYFWSWIRQPPGKGLEWIGYIYYSGPTNYNPSLKSRVTISVDTSKNQFSLKLSSVTAADTAVYYCARGPLIQLWLAPFDYWGQGTLVTVSSASTKGPSVFPLAPSSKSTSGGTAALGCLVKDYFPEPVTVSWNSGALTSGVHTFPAVLQSSGLYSLSSVVTVPSSSLGTQTYICNVNHKPSDTKVDKKVEPKSCDKTHTCPPCPAPPVAGPSVFLFPPKPKDTLMISRTPEVTCVVVDVKHEDPEVKFNWYVDGVEVHNAKTKPREEEYNSTYRVVSVLTVLHQDWLNGKEYKCKVSNKALPAPIEKTISKAKGQPREPQVYTLPPSREEMTKNQVSLTCDVSGFYPSDIAVEWESDGQPENNYKTTPPVLDSDGSFFLYSKLTVDKSRWEQGDVFSCSVLHEALHSHYTQKSLSLSPGK

SEQ ID NO: 2989 - protein, 479 aa, synthetic construct; identical to SEQ ID NO: 1138
  source 1..479: note = XENP43461 Chain 2 - 1A7[CD28]_H1.14_L1.71_scFv(GKPGS)4_Fc(216)_IgG1_C220S/PVA_/ S267K/S364K/E357Q/M428L/N434S

SEQ ID NO: 2990 - protein, 214 aa, synthetic construct; identical to SEQ ID NO: 2686
  source 1..214: note = XENP43461 Chain 3 - XPL1-6B1_L1

SEQ ID NO: 2991 - protein, 683 aa, synthetic construct; identical to SEQ ID NO: 2988
  source 1..683: note = XENP43462 Chain 1 - XPL2-16G11[PD-L2]_H3.7_Fab_(G4A)2_XPL1-13G7[PD-L1]_H2.18_Ig G1_pI(-)_Isosteric_A_PVA_/S267K/L368D/K370S/M428L/N434S

SEQ ID NO: 2992 - protein, 479 aa, synthetic construct
  source 1..479: note = XENP43462 Chain 2 - 1A7[CD28]_H1.14_L1.71_SS_scFv(GKPGS)4_Fc(216)_IgG1_C220S/PV A_/S267K/S364K/E357Q/M428L/N434S
EVQLLESGGGLVQPGGSLRLSCAASGFTFSSYYMSWVRQAPGKCLEWVSTISESGDSTYYADSVKGRFTISRDNSKNTLYLQMNSLRAEDTAVYYCAKSGPGLRQVGFDYWGQGTLVTVSSGKPGSGKPGSGKPGSGKPGSDIQMTQSPSSLSASVGDRVTITCRASQSISSYLNWYQQKPGKAPKLLIYAASSLQSGVPSRFSGSGSGTDFTLTISSLQPEDFATYYCQQVYSTPFTFGCGTKLEIKEPKSSDKTHTCPPCPAPPVAGPSVFLFPPKPKDTLMISRTPEVTCVVVDVKHEDPEVKFNWYVDGVEVHNAKTKPREEQYNSTYRVVSVLTVLHQDWLNGKEYKCKVSNKALPAPIEKTISKAKGQPREPQVYTLPPSREQMTKNQVKLTCLVKGFYPSDIAVEWESNGQPENNYKTTPPVLDSDGSFFLYSKLTVDKSRWQQGNVFSCSVLHEALHSHYTQKSLSLSPGK

SEQ ID NO: 2993 - protein, 214 aa, synthetic construct; identical to SEQ ID NO: 2686
  source 1..214: note = XENP43462 Chain 3 - 6B1_L1

SEQ ID NO: 2994 - protein, 684 aa, synthetic construct
  source 1..684: note = XENP43465 Chain 1 - 1F12A4.249[PD-L2]_H1.1_(G4A)2_2A3A4.248[PD-L1]_H1.9_IgG1_pI (-)_Isosteric_A_PVA_/S267K/L368D/K370S/M428L/N434S
QVQLVQSGAEVKKPGSSVKVSCKASGGTFSNSVMSWVRQAPGQGLEWMGGIIPIFLAVNYAPKFQGRVTITADESTSTAYMELSSLRSEDTAVYYCAREVSRPGTEFDYWGQGTLVTVSSASTKGPSVFPLAPSSKSTSGGTAALGCLVKDYFPEPVTVSWNSGALTSGVHTFPAVLQSSGLYSLSSVVTVPSSSLGTQTYICNVNHKPSDTKVDKKVEPKSCGGGGAGGGGAQVQLVQSGAEVKKPGSSVKVSCKASGGTFSRYAISWVRQAPGQGLEWMGGIVPAFGYPAYAQKFQGRVTITADESTSTAYMELSSLRSEDTAVYYCARDDWAGPYEWTFDYWGQGTLVTVSSASTKGPSVFPLAPSSKSTSGGTAALGCLVKDYFPEPVTVSWNSGALTSGVHTFPAVLQSSGLYSLSSVVTVPSSSLGTQTYICNVNHKPSDTKVDKKVEPKSCDKTHTCPPCPAPPVAGPSVFLFPPKPKDTLMISRTPEVTCVVVDVKHEDPEVKFNWYVDGVEVHNAKTKPREEEYNSTYRVVSVLTVLHQDWLNGKEYKCKVSNKALPAPIEKTISKAKGQPREPQVYTLPPSREEMTKNQVSLTCDVSGFYPSDIAVEWESDGQPENNYKTTPPVLDSDGSFFLYSKLTVDKSRWEQGDVFSCSVLHEALHSHYTQKSLSLSPGK

SEQ ID NO: 2995 - protein, 479 aa, synthetic construct; identical to SEQ ID NO: 1138
  source 1..479: note = XENP43465 Chain 2 - 1A7[CD28]_H1.14_L1.71_scFv(GKPGS)4_Fc(216)_IgG1_C220S/PVA_/ S267K/S364K/E357Q/M428L/N434S

SEQ ID NO: 2996 - protein, 214 aa, synthetic construct; identical to SEQ ID NO: 2936
  source 1..214: note = XENP43465 Chain 3 - IGKV1-39_L1

SEQ ID NO: 2997 - protein, 684 aa, synthetic construct; identical to SEQ ID NO: 2994
  source 1..684: note = XENP43466 Chain 1 - 1F12A4.249[PD-L2]_H1.1_(G4A)2_2A3A4.248[PD-L1]_H1.9_IgG1_pI (-)_Isosteric_A_PVA_/S267K/L368D/K370S/M428L/N434S

SEQ ID NO: 2998 - protein, 479 aa, synthetic construct; identical to SEQ ID NO: 2992
  source 1..479: note = XENP43466 Chain 2 - 1A7[CD28]_H1.14_L1.71_SS_scFv(GKPGS)4_Fc(216)_IgG1_C220S/PV A_/S267K/S364K/E357Q/M428L/N434S

SEQ ID NO: 2999 - protein, 214 aa, synthetic construct; identical to SEQ ID NO: 2936
  source 1..214: note = XENP43466 Chain 3 - IGKV1-39_L1

SEQ ID NO: 3000 - protein, 683 aa, synthetic construct; identical to SEQ ID NO: 2988
  source 1..683: note = XENP43862 Chain 1 - XPL2-16G11[PD-L2]_H3.7_Fab_(G4A)2_XPL1-13G7[PD-L1]_H2.18_Ig G1_pI(-)_Isosteric_A_PVA_/S267K/L368D/K370S/M428L/N434S

SEQ ID NO: 3001 - protein, 479 aa, synthetic construct; identical to SEQ ID NO: 1149
  source 1..479: note = XENP43862 Chain 2 - 1A7[CD28]_L1.71_H1.14_scFv(GKPGS)4_Fc(216)_IgG1_C220S/PVA_/ S267K/S364K/E357Q

SEQ ID NO: 3002 - protein, 214 aa, synthetic construct; identical to SEQ ID NO: 2686
  source 1..214: note = XENP43862 Chain 3 - 6B1_L1

SEQ ID NO: 3003 - protein, 683 aa, synthetic construct; identical to SEQ ID NO: 2988
  source 1..683: note = XENP43863 Chain 1 - XPL2-16G11[PD-L2]_H3.7_Fab_(G4A)2_XPL1-13G7[PD-L1]_H2.18_Ig G1_pI(-)_Isosteric_A_PVA_/S267K/L368D/K370S/M428L/N434S

SEQ ID NO: 3004 - protein, 479 aa, synthetic construct
  source 1..479: note = XENP43863 Chain 2 - 1A7[CD28]_L1.71_H1.14_SS_scFv(GKPGS)4_Fc(216)_IgG1_C220S/PV A_/S267K/S364K/E357Q
DIQMTQSPSSLSASVGDRVTITCRASQSISSYLNWYQQKPGKAPKLLIYAASSLQSGVPSRFSGSGSGTDFTLTISSLQPEDFATYYCQQVYSTPFTFGCGTKLEIKGKPGSGKPGSGKPGSGKPGSEVQLLESGGGLVQPGGSLRLSCAASGFTFSSYYMSWVRQAPGKCLEWVSTISESGDSTYYADSVKGRFTISRDNSKNTLYLQMNSLRAEDTAVYYCAKSGPGLRQVGFDYWGQGTLVTVSSEPKSSDKTHTCPPCPAPPVAGPSVFLFPPKPKDTLMISRTPEVTCVVVDVKHEDPEVKFNWYVDGVEVHNAKTKPREEQYNSTYRVVSVLTVLHQDWLNGKEYKCKVSNKALPAPIEKTISKAKGQPREPQVYTLPPSREQMTKNQVKLTCLVKGFYPSDIAVEWESNGQPENNYKTTPPVLDSDGSFFLYSKLTVDKSRWQQGNVFSCSVMHEALHNHYTQKSLSLSPGK

SEQ ID NO: 3005 - protein, 214 aa, synthetic construct; identical to SEQ ID NO: 2686
  source 1..214: note = XENP43863 Chain 3 - 6B1_L1

SEQ ID NO: 3006 - protein, 683 aa, synthetic construct; identical to SEQ ID NO: 2988
  source 1..683: note = XENP43959 Chain 1 - XPL2-16G11[PD-L2]_H3.7_Fab_(G4A)2_XPL1-13G7[PD-L1]_H2.18_Ig G1_pI(-)_Isosteric_A_PVA_/S267K/L368D/K370S/M428L/N434S

SEQ ID NO: 3007 - protein, 479 aa, synthetic construct
  source 1..479: note = XENP43959 Chain 2 - 1A7[CD28]_H1.14_L1.71_VH_Q119C_VL_A49C_scFv(GKPGS)4_Fc(216) _IgG1_C220S/PVA_/S267K/S364K/E357Q
EVQLLESGGGLVQPGGSLRLSCAASGFTFSSYYMSWVRQAPGKGLEWVSTISESGDSTYYADSVKGRFTISRDNSKNTLYLQMNSLRAEDTAVYYCAKSGPGLRQVGFDYWGCGTLVTVSSGKPGSGKPGSGKPGSGKPGSDIQMTQSPSSLSASVGDRVTITCRASQSISSYLNWYQQKPGKCPKLLIYAASSLQSGVPSRFSGSGSGTDFTLTISSLQPEDFATYYCQQVYSTPFTFGQGTKLEIKEPKSSDKTHTCPPCPAPPVAGPSVFLFPPKPKDTLMISRTPEVTCVVVDVKHEDPEVKFNWYVDGVEVHNAKTKPREEQYNSTYRVVSVLTVLHQDWLNGKEYKCKVSNKALPAPIEKTISKAKGQPREPQVYTLPPSREQMTKNQVKLTCLVKGFYPSDIAVEWESNGQPENNYKTTPPVLDSDGSFFLYSKLTVDKSRWQQGNVFSCSVLHEALHSHYTQKSLSLSPGK

SEQ ID NO: 3008 - protein, 214 aa, synthetic construct; identical to SEQ ID NO: 2686
  source 1..214: note = XENP43959 Chain 3 - 6B1_L1

SEQ ID NO: 3009 - protein, 683 aa, synthetic construct; identical to SEQ ID NO: 2988
  source 1..683: note = XENP44214 Chain 1 - XPL2-16G11[PD-L2]_H3.7_Fab_(G4A)2_XPL1-13G7[PD-L1]_H2.18_Ig G1_pI(-)_Isosteric_A_PVA_/S267K/L368D/K370S/M428L/N434S

SEQ ID NO: 3010 - protein, 479 aa, synthetic construct
  source 1..479: note = XENP44214 Chain 2 - 1A7[CD28]_H1_L1.71_scFv(GKPGS)4_Fc(216)_IgG1_C220S/PVA_/S26 7K/S364K/E357Q/M428L/N434S
EVQLLESGGGLVQPGGSLRLSCAASGFTFSSYAMSWVRQAPGKGLEWVSTISGSGDSTYYADSVKGRFTISRDNSKNTLYLQMNSLRAEDTAVYYCAKSGPGLRQVGFDYWGQGTLVTVSSGKPGSGKPGSGKPGSGKPGSDIQMTQSPSSLSASVGDRVTITCRASQSISSYLNWYQQKPGKAPKLLIYAASSLQSGVPSRFSGSGSGTDFTLTISSLQPEDFATYYCQQVYSTPFTFGQGTKLEIKEPKSSDKTHTCPPCPAPPVAGPSVFLFPPKPKDTLMISRTPEVTCVVVDVKHEDPEVKFNWYVDGVEVHNAKTKPREEQYNSTYRVVSVLTVLHQDWLNGKEYKCKVSNKALPAPIEKTISKAKGQPREPQVYTLPPSREQMTKNQVKLTCLVKGFYPSDIAVEWESNGQPENNYKTTPPVLDSDGSFFLYSKLTVDKSRWQQGNVFSCSVLHEALHSHYTQKSLSLSPGK

SEQ ID NO: 3011 - protein, 214 aa, synthetic construct; identical to SEQ ID NO: 2686
  source 1..214: note = XENP44214 Chain 3 - 6B1_L1

SEQ ID NO: 3012 - protein, 683 aa, synthetic construct; identical to SEQ ID NO: 2988
  source 1..683: note = XENP44215 Chain 1 - XPL2-16G11[PD-L2]_H3.7_Fab_(G4A)2_XPL1-13G7[PD-L1]_H2.18_Ig G1_pI(-)_Isosteric_A_PVA_/S267K/L368D/K370S/M428L/N434S

SEQ ID NO: 3013 - protein, 479 aa, synthetic construct
  source 1..479: note = XENP44215 Chain 2 - 1A7[CD28]_H1.1_L1.71_scFv(GKPGS)4_Fc(216)_IgG1_C220S/PVA_/S 267K/S364K/E357Q/M428L/N434S
EVQLLESGGGLVQPGGSLRLSCAASGFTFSSYYMSWVRQAPGKGLEWVSTISGSGDSTYYADSVKGRFTISRDNSKNTLYLQMNSLRAEDTAVYYCAKSGPGLRQVGFDYWGQGTLVTVSSGKPGSGKPGSGKPGSGKPGSDIQMTQSPSSLSASVGDRVTITCRASQSISSYLNWYQQKPGKAPKLLIYAASSLQSGVPSRFSGSGSGTDFTLTISSLQPEDFATYYCQQVYSTPFTFGQGTKLEIKEPKSSDKTHTCPPCPAPPVAGPSVFLFPPKPKDTLMISRTPEVTCVVVDVKHEDPEVKFNWYVDGVEVHNAKTKPREEQYNSTYRVVSVLTVLHQDWLNGKEYKCKVSNKALPAPIEKTISKAKGQPREPQVYTLPPSREQMTKNQVKLTCLVKGFYPSDIAVEWESNGQPENNYKTTPPVLDSDGSFFLYSKLTVDKSRWQQGNVFSCSVLHEALHSHYTQKSLSLSPGK

SEQ ID NO: 3014 - protein, 214 aa, synthetic construct; identical to SEQ ID NO: 2686
  source 1..214: note = XENP44215 Chain 3 - 6B1_L1

SEQ ID NO: 3015 - protein, 684 aa, synthetic construct; identical to SEQ ID NO: 2994
  source 1..684: note = XENP44279 Chain 1 - 1F12A4.249[PD-L2]_H1.1_(G4A)2_2A3A4.248[PD-L1]_H1.9_IgG1_pI (-)_Isosteric_A_PVA_/S267K/L368D/K370S/M428L/N434S

SEQ ID NO: 3016 - protein, 479 aa, synthetic construct; identical to SEQ ID NO: 3010
  source 1..479: note = XENP44279 Chain 2 - 1A7[CD28]_H1_L1.71_scFv(GKPGS)4_Fc(216)_IgG1_C220S/PVA_/S26 7K/S364K/E357Q/M428L/N434S

SEQ ID NO: 3017 - protein, 214 aa, synthetic construct; identical to SEQ ID NO: 2936
  source 1..214: note = XENP44279 Chain 3 - IGKV1-39_L1

SEQ ID NO: 3018 - protein, 684 aa, synthetic construct; identical to SEQ ID NO: 2994
  source 1..684: note = XENP44280 Chain 1 - 1F12A4.249[PD-L2]_H1.1_(G4A)2_2A3A4.248[PD-L1]_H1.9_IgG1_pI (-)_Isosteric_A_PVA_/S267K/L368D/K370S/M428L/N434S

SEQ ID NO: 3019 - protein, 479 aa, synthetic construct; identical to SEQ ID NO: 3013
  source 1..479: note = XENP44280 Chain 2 - 1A7[CD28]_H1.1_L1.71_scFv(GKPGS)4_Fc(216)_IgG1_C220S/PVA_/S 267K/S364K/E357Q/M428L/N434S

SEQ ID NO: 3020 - protein, 214 aa, synthetic construct; identical to SEQ ID NO: 2936
  source 1..214: note = XENP44280 Chain 3 - IGKV1-39_L1

SEQ ID NO: 3021 - protein, 683 aa, synthetic construct; identical to SEQ ID NO: 2988
  source 1..683: note = XENP44530 Chain 1 - XPL2-16G11[PD-L2]_H3.7_Fab_(G4A)2_XPL1-13G7[PD-L1]_H2.18_Ig G1_pI(-)_Isosteric_A_PVA_/S267K/L368D/K370S/M428L/N434S

SEQ ID NO: 3022 - protein, 479 aa, synthetic construct
  source 1..479: note = XENP44530 Chain 2 - 1A7[CD28]_H1.129_L1_scFv(GKPGS)4_Fc(216)_IgG1_C220S/PVA_/S2 67K/S364K/E357Q
EVQLLESGGGLVQPGGSLRLSCAASGFTFSSYYMSWVRQAPGKGLEWVSTISERADSTYYADSVKGRFTISRDNSKNTLYLQMNSLRAEDTAVYYCAKSGPGLRQVGFDYWGQGTLVTVSSGKPGSGKPGSGKPGSGKPGSDIQMTQSPSSLSASVGDRVTITCRASQSISSYLNWYQQKPGKAPKLLIYAASSLQSGVPSRFSGSGSGTDFTLTISSLQPEDFATYYCQQSYSTPFTFGQGTKLEIKEPKSSDKTHTCPPCPAPPVAGPSVFLFPPKPKDTLMISRTPEVTCVVVDVKHEDPEVKFNWYVDGVEVHNAKTKPREEQYNSTYRVVSVLTVLHQDWLNGKEYKCKVSNKALPAPIEKTISKAKGQPREPQVYTLPPSREQMTKNQVKLTCLVKGFYPSDIAVEWESNGQPENNYKTTPPVLDSDGSFFLYSKLTVDKSRWQQGNVFSCSVMHEALHNHYTQKSLSLSPGK

SEQ ID NO: 3023 - protein, 214 aa, synthetic construct; identical to SEQ ID NO: 2686
  source 1..214: note = XENP44530 Chain 3 - 6B1_L1

SEQ ID NO: 3024 - protein, 683 aa, synthetic construct; identical to SEQ ID NO: 2988
  source 1..683: note = XENP44531 Chain 1 - XPL2-16G11[PD-L2]_H3.7_Fab_(G4A)2_XPL1-13G7[PD-L1]_H2.18_Ig G1_pI(-)_Isosteric_A_PVA_/S267K/L368D/K370S/M428L/N434S

SEQ ID NO: 3025 - protein, 479 aa, synthetic construct
  source 1..479: note = XENP44531 Chain 2 - 1A7[CD28]_H1.129_L1.71_scFv(GKPGS)4_Fc(216)_IgG1_C220S/PVA_ /S267K/S364K/E357Q
EVQLLESGGGLVQPGGSLRLSCAASGFTFSSYYMSWVRQAPGKGLEWVSTISERADSTYYADSVKGRFTISRDNSKNTLYLQMNSLRAEDTAVYYCAKSGPGLRQVGFDYWGQGTLVTVSSGKPGSGKPGSGKPGSGKPGSDIQMTQSPSSLSASVGDRVTITCRASQSISSYLNWYQQKPGKAPKLLIYAASSLQSGVPSRFSGSGSGTDFTLTISSLQPEDFATYYCQQVYSTPFTFGQGTKLEIKEPKSSDKTHTCPPCPAPPVAGPSVFLFPPKPKDTLMISRTPEVTCVVVDVKHEDPEVKFNWYVDGVEVHNAKTKPREEQYNSTYRVVSVLTVLHQDWLNGKEYKCKVSNKALPAPIEKTISKAKGQPREPQVYTLPPSREQMTKNQVKLTCLVKGFYPSDIAVEWESNGQPENNYKTTPPVLDSDGSFFLYSKLTVDKSRWQQGNVFSCSVMHEALHNHYTQKSLSLSPGK

SEQ ID NO: 3026 - protein, 214 aa, synthetic construct; identical to SEQ ID NO: 2686
  source 1..214: note = XENP44531 Chain 3 - 6B1_L1

SEQ ID NO: 3027 - protein, 683 aa, synthetic construct; identical to SEQ ID NO: 2988
  source 1..683: note = XENP44532 Chain 1 - XPL2-16G11[PD-L2]_H3.7_Fab_(G4A)2_XPL1-13G7[PD-L1]_H2.18_Ig G1_pI(-)_Isosteric_A_PVA_/S267K/L368D/K370S/M428L/N434S

SEQ ID NO: 3028 - protein, 479 aa, synthetic construct
  source 1..479: note = XENP44532 Chain 2 - 1A7[CD28]_L1_H1.129_scFv(GKPGS)4_Fc(216)_IgG1_C220S/PVA_/S2 67K/S364K/E357Q
DIQMTQSPSSLSASVGDRVTITCRASQSISSYLNWYQQKPGKAPKLLIYAASSLQSGVPSRFSGSGSGTDFTLTISSLQPEDFATYYCQQSYSTPFTFGQGTKLEIKGKPGSGKPGSGKPGSGKPGSEVQLLESGGGLVQPGGSLRLSCAASGFTFSSYYMSWVRQAPGKGLEWVSTISERADSTYYADSVKGRFTISRDNSKNTLYLQMNSLRAEDTAVYYCAKSGPGLRQVGFDYWGQGTLVTVSSEPKSSDKTHTCPPCPAPPVAGPSVFLFPPKPKDTLMISRTPEVTCVVVDVKHEDPEVKFNWYVDGVEVHNAKTKPREEQYNSTYRVVSVLTVLHQDWLNGKEYKCKVSNKALPAPIEKTISKAKGQPREPQVYTLPPSREQMTKNQVKLTCLVKGFYPSDIAVEWESNGQPENNYKTTPPVLDSDGSFFLYSKLTVDKSRWQQGNVFSCSVMHEALHNHYTQKSLSLSPGK

SEQ ID NO: 3029 - protein, 214 aa, synthetic construct; identical to SEQ ID NO: 2686
  source 1..214: note = XENP44532 Chain 3 - 6B1_L1

SEQ ID NO: 3030 - protein, 683 aa, synthetic construct; identical to SEQ ID NO: 2988
  source 1..683: note = XENP44533 Chain 1 - XPL2-16G11[PD-L2]_H3.7_Fab_(G4A)2_XPL1-13G7[PD-L1]_H2.18_Ig G1_pI(-)_Isosteric_A_PVA_/S267K/L368D/K370S/M428L/N434S

SEQ ID NO: 3031 - protein, 479 aa, synthetic construct
  source 1..479: note = XENP44533 Chain 2 - 1A7[CD28]_L1.71_H1.129_scFv(GKPGS)4_Fc(216)_IgG1_C220S/PVA_ /S267K/S364K/E357Q
DIQMTQSPSSLSASVGDRVTITCRASQSISSYLNWYQQKPGKAPKLLIYAASSLQSGVPSRFSGSGSGTDFTLTISSLQPEDFATYYCQQVYSTPFTFGQGTKLEIKGKPGSGKPGSGKPGSGKPGSEVQLLESGGGLVQPGGSLRLSCAASGFTFSSYYMSWVRQAPGKGLEWVSTISERADSTYYADSVKGRFTISRDNSKNTLYLQMNSLRAEDTAVYYCAKSGPGLRQVGFDYWGQGTLVTVSSEPKSSDKTHTCPPCPAPPVAGPSVFLFPPKPKDTLMISRTPEVTCVVVDVKHEDPEVKFNWYVDGVEVHNAKTKPREEQYNSTYRVVSVLTVLHQDWLNGKEYKCKVSNKALPAPIEKTISKAKGQPREPQVYTLPPSREQMTKNQVKLTCLVKGFYPSDIAVEWESNGQPENNYKTTPPVLDSDGSFFLYSKLTVDKSRWQQGNVFSCSVMHEALHNHYTQKSLSLSPGK

SEQ ID NO: 3032 - protein, 214 aa, synthetic construct; identical to SEQ ID NO: 2686
  source 1..214: note = XENP44533 Chain 3 - 6B1_L1

SEQ ID NO: 3033 - protein, 683 aa, synthetic construct; identical to SEQ ID NO: 2988
  source 1..683: note = XENP44534 Chain 1 - XPL2-16G11[PD-L2]_H3.7_Fab_(G4A)2_XPL1-13G7[PD-L1]_H2.18_Ig G1_pI(-)_Isosteric_A_PVA_/S267K/L368D/K370S/M428L/N434S

SEQ ID NO: 3034 - protein, 479 aa, synthetic construct
  source 1..479: note = XENP44534 Chain 2 - 1A7[CD28]_H1.129_L1.71_VH_G46C_VL_Q108C_scFv(GKPGS)4_Fc(216 )_IgG1_C220S/PVA_/S267K/S364K/E357Q
EVQLLESGGGLVQPGGSLRLSCAASGFTFSSYYMSWVRQAPGKCLEWVSTISERADSTYYADSVKGRFTISRDNSKNTLYLQMNSLRAEDTAVYYCAKSGPGLRQVGFDYWGQGTLVTVSSGKPGSGKPGSGKPGSGKPGSDIQMTQSPSSLSASVGDRVTITCRASQSISSYLNWYQQKPGKAPKLLIYAASSLQSGVPSRFSGSGSGTDFTLTISSLQPEDFATYYCQQVYSTPFTFGCGTKLEIKEPKSSDKTHTCPPCPAPPVAGPSVFLFPPKPKDTLMISRTPEVTCVVVDVKHEDPEVKFNWYVDGVEVHNAKTKPREEQYNSTYRVVSVLTVLHQDWLNGKEYKCKVSNKALPAPIEKTISKAKGQPREPQVYTLPPSREQMTKNQVKLTCLVKGFYPSDIAVEWESNGQPENNYKTTPPVLDSDGSFFLYSKLTVDKSRWQQGNVFSCSVMHEALHNHYTQKSLSLSPGK

SEQ ID NO: 3035 - protein, 214 aa, synthetic construct; identical to SEQ ID NO: 2686
  source 1..214: note = XENP44534 Chain 3 - 6B1_L1

SEQ ID NO: 3036 - protein, 683 aa, synthetic construct; identical to SEQ ID NO: 2988
  source 1..683: note = XENP44535 Chain 1 - XPL2-16G11[PD-L2]_H3.7_Fab_(G4A)2_XPL1-13G7[PD-L1]_H2.18_Ig G1_pI(-)_Isosteric_A_PVA_/S267K/L368D/K370S/M428L/N434S

SEQ ID NO: 3037 - protein, 479 aa, synthetic construct
  source 1..479: note = XENP44535 Chain 2 - 1A7[CD28]_L1.71_H1.129_VH_G46C_VL_Q108C_scFv(GKPGS)4_Fc(216 )_IgG1_C220S/PVA_/S267K/S364K/E357Q
DIQMTQSPSSLSASVGDRVTITCRASQSISSYLNWYQQKPGKAPKLLIYAASSLQSGVPSRFSGSGSGTDFTLTISSLQPEDFATYYCQQVYSTPFTFGCGTKLEIKGKPGSGKPGSGKPGSGKPGSEVQLLESGGGLVQPGGSLRLSCAASGFTFSSYYMSWVRQAPGKCLEWVSTISERADSTYYADSVKGRFTISRDNSKNTLYLQMNSLRAEDTAVYYCAKSGPGLRQVGFDYWGQGTLVTVSSEPKSSDKTHTCPPCPAPPVAGPSVFLFPPKPKDTLMISRTPEVTCVVVDVKHEDPEVKFNWYVDGVEVHNAKTKPREEQYNSTYRVVSVLTVLHQDWLNGKEYKCKVSNKALPAPIEKTISKAKGQPREPQVYTLPPSREQMTKNQVKLTCLVKGFYPSDIAVEWESNGQPENNYKTTPPVLDSDGSFFLYSKLTVDKSRWQQGNVFSCSVMHEALHNHYTQKSLSLSPGK

SEQ ID NO: 3038 - protein, 214 aa, synthetic construct; identical to SEQ ID NO: 2686
  source 1..214: note = XENP44535 Chain 3 - 6B1_L1

SEQ ID NO: 3039 - protein, 683 aa, synthetic construct; identical to SEQ ID NO: 2988
  source 1..683: note = XENP44536 Chain 1 - XPL2-16G11[PD-L2]_H3.7_Fab_(G4A)2_XPL1-13G7[PD-L1]_H2.18_Ig G1_pI(-)_Isosteric_A_PVA_/S267K/L368D/K370S/M428L/N434S

SEQ ID NO: 3040 - protein, 479 aa, synthetic construct
  source 1..479: note = XENP44536 Chain 2 - 1A7[CD28]_H1.106_L1_scFv(GKPGS)4_Fc(216)_IgG1_C220S/PVA_/S2 67K/S364K/E357Q
EVQLLESGGGLVQPGGSLRLSCAASGFTFSSYYMSWVRQAPGKGLEWVSTISERGDSTYYADSVKGRFTISRDNSKNTLYLQMNSLRAEDTAVYYCAKSGPGLRQVGFDYWGQGTLVTVSSGKPGSGKPGSGKPGSGKPGSDIQMTQSPSSLSASVGDRVTITCRASQSISSYLNWYQQKPGKAPKLLIYAASSLQSGVPSRFSGSGSGTDFTLTISSLQPEDFATYYCQQSYSTPFTFGQGTKLEIKEPKSSDKTHTCPPCPAPPVAGPSVFLFPPKPKDTLMISRTPEVTCVVVDVKHEDPEVKFNWYVDGVEVHNAKTKPREEQYNSTYRVVSVLTVLHQDWLNGKEYKCKVSNKALPAPIEKTISKAKGQPREPQVYTLPPSREQMTKNQVKLTCLVKGFYPSDIAVEWESNGQPENNYKTTPPVLDSDGSFFLYSKLTVDKSRWQQGNVFSCSVMHEALHNHYTQKSLSLSPGK

SEQ ID NO: 3041 - protein, 214 aa, synthetic construct; identical to SEQ ID NO: 2686
  source 1..214: note = XENP44536 Chain 3 - 6B1_L1

SEQ ID NO: 3042 - protein, 683 aa, synthetic construct; identical to SEQ ID NO: 2988
  source 1..683: note = XENP44537 Chain 1 - XPL2-16G11[PD-L2]_H3.7_Fab_(G4A)2_XPL1-13G7[PD-L1]_H2.18_Ig G1_pI(-)_Isosteric_A_PVA_/S267K/L368D/K370S/M428L/N434S

SEQ ID NO: 3043 - protein, 479 aa, synthetic construct
  source 1..479: note = XENP44537 Chain 2 - 1A7[CD28]_H1.106_L1.71_scFv(GKPGS)4_Fc(216)_IgG1_C220S/PVA_ /S267K/S364K/E357Q
EVQLLESGGGLVQPGGSLRLSCAASGFTFSSYYMSWVRQAPGKGLEWVSTISERGDSTYYADSVKGRFTISRDNSKNTLYLQMNSLRAEDTAVYYCAKSGPGLRQVGFDYWGQGTLVTVSSGKPGSGKPGSGKPGSGKPGSDIQMTQSPSSLSASVGDRVTITCRASQSISSYLNWYQQKPGKAPKLLIYAASSLQSGVPSRFSGSGSGTDFTLTISSLQPEDFATYYCQQVYSTPFTFGQGTKLEIKEPKSSDKTHTCPPCPAPPVAGPSVFLFPPKPKDTLMISRTPEVTCVVVDVKHEDPEVKFNWYVDGVEVHNAKTKPREEQYNSTYRVVSVLTVLHQDWLNGKEYKCKVSNKALPAPIEKTISKAKGQPREPQVYTLPPSREQMTKNQVKLTCLVKGFYPSDIAVEWESNGQPENNYKTTPPVLDSDGSFFLYSKLTVDKSRWQQGNVFSCSVMHEALHNHYTQKSLSLSPGK

SEQ ID NO: 3044 - protein, 214 aa, synthetic construct; identical to SEQ ID NO: 2686
  source 1..214: note = XENP44537 Chain 3 - 6B1_L1

SEQ ID NO: 3045 - protein, 683 aa, synthetic construct; identical to SEQ ID NO: 2988
  source 1..683: note = XENP44538 Chain 1 - XPL2-16G11[PD-L2]_H3.7_Fab_(G4A)2_XPL1-13G7[PD-L1]_H2.18_Ig G1_pI(-)_Isosteric_A_PVA_/S267K/L368D/K370S/M428L/N434S

SEQ ID NO: 3046 - protein, 479 aa, synthetic construct
  source 1..479: note = XENP44538 Chain 2 - 1A7[CD28]_L1_H1.106_scFv(GKPGS)4_Fc(216)_IgG1_C220S/PVA_/S2 67K/S364K/E357Q
DIQMTQSPSSLSASVGDRVTITCRASQSISSYLNWYQQKPGKAPKLLIYAASSLQSGVPSRFSGSGSGTDFTLTISSLQPEDFATYYCQQSYSTPFTFGQGTKLEIKGKPGSGKPGSGKPGSGKPGSEVQLLESGGGLVQPGGSLRLSCAASGFTFSSYYMSWVRQAPGKGLEWVSTISERGDSTYYADSVKGRFTISRDNSKNTLYLQMNSLRAEDTAVYYCAKSGPGLRQVGFDYWGQGTLVTVSSEPKSSDKTHTCPPCPAPPVAGPSVFLFPPKPKDTLMISRTPEVTCVVVDVKHEDPEVKFNWYVDGVEVHNAKTKPREEQYNSTYRVVSVLTVLHQDWLNGKEYKCKVSNKALPAPIEKTISKAKGQPREPQVYTLPPSREQMTKNQVKLTCLVKGFYPSDIAVEWESNGQPENNYKTTPPVLDSDGSFFLYSKLTVDKSRWQQGNVFSCSVMHEALHNHYTQKSLSLSPGK

SEQ ID NO: 3047 - protein, 214 aa, synthetic construct; identical to SEQ ID NO: 2686
  source 1..214: note = XENP44538 Chain 3 - 6B1_L1

SEQ ID NO: 3048 - protein, 683 aa, synthetic construct; identical to SEQ ID NO: 2988
  source 1..683: note = XENP44539 Chain 1 - XPL2-16G11[PD-L2]_H3.7_Fab_(G4A)2_XPL1-13G7[PD-L1]_H2.18_Ig G1_pI(-)_Isosteric_A_PVA_/S267K/L368D/K370S/M428L/N434S

SEQ ID NO: 3049 - protein, 479 aa, synthetic construct
  source 1..479: note = XENP44539 Chain 2 - 1A7[CD28]_L1.71_H1.106_scFv(GKPGS)4_Fc(216)_IgG1_C220S/PVA_ /S267K/S364K/E357Q
DIQMTQSPSSLSASVGDRVTITCRASQSISSYLNWYQQKPGKAPKLLIYAASSLQSGVPSRFSGSGSGTDFTLTISSLQPEDFATYYCQQVYSTPFTFGQGTKLEIKGKPGSGKPGSGKPGSGKPGSEVQLLESGGGLVQPGGSLRLSCAASGFTFSSYYMSWVRQAPGKGLEWVSTISERGDSTYYADSVKGRFTISRDNSKNTLYLQMNSLRAEDTAVYYCAKSGPGLRQVGFDYWGQGTLVTVSSEPKSSDKTHTCPPCPAPPVAGPSVFLFPPKPKDTLMISRTPEVTCVVVDVKHEDPEVKFNWYVDGVEVHNAKTKPREEQYNSTYRVVSVLTVLHQDWLNGKEYKCKVSNKALPAPIEKTISKAKGQPREPQVYTLPPSREQMTKNQVKLTCLVKGFYPSDIAVEWESNGQPENNYKTTPPVLDSDGSFFLYSKLTVDKSRWQQGNVFSCSVMHEALHNHYTQKSLSLSPGK

SEQ ID NO: 3050 - protein, 214 aa, synthetic construct; identical to SEQ ID NO: 2686
  source 1..214: note = XENP44539 Chain 3 - 6B1_L1

SEQ ID NO: 3051 - protein, 683 aa, synthetic construct; identical to SEQ ID NO: 2988
  source 1..683: note = XENP44540 Chain 1 - XPL2-16G11[PD-L2]_H3.7_Fab_(G4A)2_XPL1-13G7[PD-L1]_H2.18_Ig G1_pI(-)_Isosteric_A_PVA_/S267K/L368D/K370S/M428L/N434S

SEQ ID NO: 3052 - protein, 479 aa, synthetic construct
  source 1..479: note = XENP44540 Chain 2 - 1A7[CD28]_H1.106_L1.71_VH_G46C_VL_Q108C_scFv(GKPGS)4_Fc(216 )_IgG1_C220S/PVA_/S267K/S364K/E357Q
EVQLLESGGGLVQPGGSLRLSCAASGFTFSSYYMSWVRQAPGKCLEWVSTISERGDSTYYADSVKGRFTISRDNSKNTLYLQMNSLRAEDTAVYYCAKSGPGLRQVGFDYWGQGTLVTVSSGKPGSGKPGSGKPGSGKPGSDIQMTQSPSSLSASVGDRVTITCRASQSISSYLNWYQQKPGKAPKLLIYAASSLQSGVPSRFSGSGSGTDFTLTISSLQPEDFATYYCQQVYSTPFTFGCGTKLEIKEPKSSDKTHTCPPCPAPPVAGPSVFLFPPKPKDTLMISRTPEVTCVVVDVKHEDPEVKFNWYVDGVEVHNAKTKPREEQYNSTYRVVSVLTVLHQDWLNGKEYKCKVSNKALPAPIEKTISKAKGQPREPQVYTLPPSREQMTKNQVKLTCLVKGFYPSDIAVEWESNGQPENNYKTTPPVLDSDGSFFLYSKLTVDKSRWQQGNVFSCSVMHEALHNHYTQKSLSLSPGK

SEQ ID NO: 3053 - protein, 214 aa, synthetic construct; identical to SEQ ID NO: 2686
  source 1..214: note = XENP44540 Chain 3 - 6B1_L1

SEQ ID NO: 3054 - protein, 683 aa, synthetic construct; identical to SEQ ID NO: 2988
  source 1..683: note = XENP44541 Chain 1 - XPL2-16G11[PD-L2]_H3.7_Fab_(G4A)2_XPL1-13G7[PD-L1]_H2.18_Ig G1_pI(-)_Isosteric_A_PVA_/S267K/L368D/K370S/M428L/N434S

SEQ ID NO: 3055 - protein, 479 aa, synthetic construct
  source 1..479: note = XENP44541 Chain 2 - 1A7[CD28]_L1.71_H1.106_VH_G46C_VL_Q108C_scFv(GKPGS)4_Fc(216 )_IgG1_C220S/PVA_/S267K/S364K/E357Q
DIQMTQSPSSLSASVGDRVTITCRASQSISSYLNWYQQKPGKAPKLLIYAASSLQSGVPSRFSGSGSGTDFTLTISSLQPEDFATYYCQQVYSTPFTFGCGTKLEIKGKPGSGKPGSGKPGSGKPGSEVQLLESGGGLVQPGGSLRLSCAASGFTFSSYYMSWVRQAPGKCLEWVSTISERGDSTYYADSVKGRFTISRDNSKNTLYLQMNSLRAEDTAVYYCAKSGPGLRQVGFDYWGQGTLVTVSSEPKSSDKTHTCPPCPAPPVAGPSVFLFPPKPKDTLMISRTPEVTCVVVDVKHEDPEVKFNWYVDGVEVHNAKTKPREEQYNSTYRVVSVLTVLHQDWLNGKEYKCKVSNKALPAPIEKTISKAKGQPREPQVYTLPPSREQMTKNQVKLTCLVKGFYPSDIAVEWESNGQPENNYKTTPPVLDSDGSFFLYSKLTVDKSRWQQGNVFSCSVMHEALHNHYTQKSLSLSPGK

SEQ ID NO: 3056 - protein, 214 aa, synthetic construct; identical to SEQ ID NO: 2686
  source 1..214: note = XENP44541 Chain 3 - 6B1_L1

SEQ ID NO: 3057 - protein, 450 aa, synthetic construct; identical to SEQ ID NO: 2919
  source 1..450: note = XENP42971 Chain 1 - XPL1-13G7[PD-L1]_H2_IgG1_pI(-)_Isosteric_A_PVA_/S267K/L368D /K370S

SEQ ID NO: 3058 - protein, 716 aa, synthetic construct
  source 1..716: note = XENP42971 Chain 2 - XPL2-16G11[PD-L2]_H2_(G4S)2_1A7[CD28]_H1.14_L1.71_scFv(GKPG S)4_(G4S)2_Fc(222)_IgG1_PVA_/S267K/S364K/E357Q
QVQLQESGSGLVKPPGTLSLTCAVSGGSISSSNWWSWVRQPPGKGLEWIGEIFHIGSTNYNPSLKSRVTISVDKSKNQFSLKLSSVTAADTAVYYCARVSFGDSYYFDYWGQGTLVTVSSASTKGPSVFPLAPSSKSTSGGTAALGCLVKDYFPEPVTVSWNSGALTSGVHTFPAVLQSSGLYSLSSVVTVPSSSLGTQTYICNVNHKPSNTKVDKKVEPKSCGGGGSGGGGSEVQLLESGGGLVQPGGSLRLSCAASGFTFSSYYMSWVRQAPGKGLEWVSTISESGDSTYYADSVKGRFTISRDNSKNTLYLQMNSLRAEDTAVYYCAKSGPGLRQVGFDYWGQGTLVTVSSGKPGSGKPGSGKPGSGKPGSDIQMTQSPSSLSASVGDRVTITCRASQSISSYLNWYQQKPGKAPKLLIYAASSLQSGVPSRFSGSGSGTDFTLTISSLQPEDFATYYCQQVYSTPFTFGQGTKLEIKGGGGSGGGGSKTHTCPPCPAPPVAGPSVFLFPPKPKDTLMISRTPEVTCVVVDVKHEDPEVKFNWYVDGVEVHNAKTKPREEQYNSTYRVVSVLTVLHQDWLNGKEYKCKVSNKALPAPIEKTISKAKGQPREPQVYTLPPSREQMTKNQVKLTCLVKGFYPSDIAVEWESNGQPENNYKTTPPVLDSDGSFFLYSKLTVDKSRWQQGNVFSCSVMHEALHNHYTQKSLSLSPGK

SEQ ID NO: 3059 - protein, 214 aa, synthetic construct; identical to SEQ ID NO: 2686
  source 1..214: note = XENP42971 Chain 3 - 6B1_L1

SEQ ID NO: 3060 - protein, 449 aa, synthetic construct; identical to SEQ ID NO: 2931
  source 1..449: note = XENP42972 Chain 1 - XPL2-16G11[PD-L2]_H2_IgG1_pI(-)_Isosteric_A_PVA_/S267K/L368 D/K370S

SEQ ID NO: 3061 - protein, 717 aa, synthetic construct
  source 1..717: note = XENP42972 Chain 2 - XPL1-13G7[PD-L1]_H2_(G4S)2_1A7[CD28]_H1.14_L1.71_scFv(GKPGS )4_(G4S)2_Fc(222)_IgG1_PVA_/S267K/S364K/E357Q
QVQLQESGPGLVKPSETLSLTCTVSGGSISSYFWSWIRQPPGKGLEWIGYIYYSGSTNYNPSLKSRVTISVDTSKNQFSLKLSSVTAADTAVYYCARGPLIQLWLPPFDYWGQGTLVTVSSASTKGPSVFPLAPSSKSTSGGTAALGCLVKDYFPEPVTVSWNSGALTSGVHTFPAVLQSSGLYSLSSVVTVPSSSLGTQTYICNVNHKPSNTKVDKKVEPKSCGGGGSGGGGSEVQLLESGGGLVQPGGSLRLSCAASGFTFSSYYMSWVRQAPGKGLEWVSTISESGDSTYYADSVKGRFTISRDNSKNTLYLQMNSLRAEDTAVYYCAKSGPGLRQVGFDYWGQGTLVTVSSGKPGSGKPGSGKPGSGKPGSDIQMTQSPSSLSASVGDRVTITCRASQSISSYLNWYQQKPGKAPKLLIYAASSLQSGVPSRFSGSGSGTDFTLTISSLQPEDFATYYCQQVYSTPFTFGQGTKLEIKGGGGSGGGGSKTHTCPPCPAPPVAGPSVFLFPPKPKDTLMISRTPEVTCVVVDVKHEDPEVKFNWYVDGVEVHNAKTKPREEQYNSTYRVVSVLTVLHQDWLNGKEYKCKVSNKALPAPIEKTISKAKGQPREPQVYTLPPSREQMTKNQVKLTCLVKGFYPSDIAVEWESNGQPENNYKTTPPVLDSDGSFFLYSKLTVDKSRWQQGNVFSCSVMHEALHNHYTQKSLSLSPGK

SEQ ID NO: 3062 - protein, 214 aa, synthetic construct; identical to SEQ ID NO: 2686
  source 1..214: note = XENP42972 Chain 3 - 6B1_L1

SEQ ID NO: 3063 - protein, 450 aa, synthetic construct; identical to SEQ ID NO: 2919
  source 1..450: note = XENP42973 Chain 1 - XPL1-13G7[PD-L1]_H2_IgG1_pI(-)_Isosteric_A_PVA_/S267K/L368D /K370S

SEQ ID NO: 3064 - protein, 716 aa, synthetic construct
  source 1..716: note = XENP42973 Chain 2 - XPL2-16G11[PD-L2]_H2_(G4S)2_1A7[CD28]_L1.71_H1.14_scFv(GKPG S)4_(G4S)2_Fc(222)_IgG1_PVA_/S267K/S364K/E357Q
QVQLQESGSGLVKPPGTLSLTCAVSGGSISSSNWWSWVRQPPGKGLEWIGEIFHIGSTNYNPSLKSRVTISVDKSKNQFSLKLSSVTAADTAVYYCARVSFGDSYYFDYWGQGTLVTVSSASTKGPSVFPLAPSSKSTSGGTAALGCLVKDYFPEPVTVSWNSGALTSGVHTFPAVLQSSGLYSLSSVVTVPSSSLGTQTYICNVNHKPSNTKVDKKVEPKSCGGGGSGGGGSDIQMTQSPSSLSASVGDRVTITCRASQSISSYLNWYQQKPGKAPKLLIYAASSLQSGVPSRFSGSGSGTDFTLTISSLQPEDFATYYCQQVYSTPFTFGQGTKLEIKGKPGSGKPGSGKPGSGKPGSEVQLLESGGGLVQPGGSLRLSCAASGFTFSSYYMSWVRQAPGKGLEWVSTISESGDSTYYADSVKGRFTISRDNSKNTLYLQMNSLRAEDTAVYYCAKSGPGLRQVGFDYWGQGTLVTVSSGGGGSGGGGSKTHTCPPCPAPPVAGPSVFLFPPKPKDTLMISRTPEVTCVVVDVKHEDPEVKFNWYVDGVEVHNAKTKPREEQYNSTYRVVSVLTVLHQDWLNGKEYKCKVSNKALPAPIEKTISKAKGQPREPQVYTLPPSREQMTKNQVKLTCLVKGFYPSDIAVEWESNGQPENNYKTTPPVLDSDGSFFLYSKLTVDKSRWQQGNVFSCSVMHEALHNHYTQKSLSLSPGK

SEQ ID NO: 3065 - protein, 214 aa, synthetic construct; identical to SEQ ID NO: 2686
  source 1..214: note = XENP42973 Chain 3 - 6B1_L1

SEQ ID NO: 3066 - protein, 449 aa, synthetic construct; identical to SEQ ID NO: 2931
  source 1..449: note = XENP42974 Chain 1 - XPL2-16G11[PD-L2]_H2_IgG1_pI(-)_Isosteric_A_PVA_/S267K/L368 D/K370S

SEQ ID NO: 3067 - protein, 717 aa, synthetic construct
  source 1..717: note = XENP42974 Chain 2 - XPL1-13G7[PD-L1]_H2_(G4S)2_1A7[CD28]_L1.71_H1.14_scFv(GKPGS )4_(G4S)2_Fc(222)_IgG1_PVA_/S267K/S364K/E357Q
QVQLQESGPGLVKPSETLSLTCTVSGGSISSYFWSWIRQPPGKGLEWIGYIYYSGSTNYNPSLKSRVTISVDTSKNQFSLKLSSVTAADTAVYYCARGPLIQLWLPPFDYWGQGTLVTVSSASTKGPSVFPLAPSSKSTSGGTAALGCLVKDYFPEPVTVSWNSGALTSGVHTFPAVLQSSGLYSLSSVVTVPSSSLGTQTYICNVNHKPSNTKVDKKVEPKSCGGGGSGGGGSDIQMTQSPSSLSASVGDRVTITCRASQSISSYLNWYQQKPGKAPKLLIYAASSLQSGVPSRFSGSGSGTDFTLTISSLQPEDFATYYCQQVYSTPFTFGQGTKLEIKGKPGSGKPGSGKPGSGKPGSEVQLLESGGGLVQPGGSLRLSCAASGFTFSSYYMSWVRQAPGKGLEWVSTISESGDSTYYADSVKGRFTISRDNSKNTLYLQMNSLRAEDTAVYYCAKSGPGLRQVGFDYWGQGTLVTVSSGGGGSGGGGSKTHTCPPCPAPPVAGPSVFLFPPKPKDTLMISRTPEVTCVVVDVKHEDPEVKFNWYVDGVEVHNAKTKPREEQYNSTYRVVSVLTVLHQDWLNGKEYKCKVSNKALPAPIEKTISKAKGQPREPQVYTLPPSREQMTKNQVKLTCLVKGFYPSDIAVEWESNGQPENNYKTTPPVLDSDGSFFLYSKLTVDKSRWQQGNVFSCSVMHEALHNHYTQKSLSLSPGK

SEQ ID NO: 3068 - protein, 214 aa, synthetic construct; identical to SEQ ID NO: 2686
  source 1..214: note = XENP42974 Chain 3 - 6B1_L1

SEQ ID NO: 3069 - protein, 450 aa, synthetic construct
  source 1..450: note = XENP43640 Chain 1 - XPL1-13G7[PD-L1]_H2.18_IgG1_PVA_/S267K/S364K/E357Q/M428L/N4 34S
QVQLQESGPGLVKPSETLSLTCTVSGGSISGYFWSWIRQPPGKGLEWIGYIYYSGPTNYNPSLKSRVTISVDTSKNQFSLKLSSVTAADTAVYYCARGPLIQLWLAPFDYWGQGTLVTVSSASTKGPSVFPLAPSSKSTSGGTAALGCLVKDYFPEPVTVSWNSGALTSGVHTFPAVLQSSGLYSLSSVVTVPSSSLGTQTYICNVNHKPSDTKVDKKVEPKSCDKTHTCPPCPAPPVAGPSVFLFPPKPKDTLMISRTPEVTCVVVDVKHEDPEVKFNWYVDGVEVHNAKTKPREEEYNSTYRVVSVLTVLHQDWLNGKEYKCKVSNKALPAPIEKTISKAKGQPREPQVYTLPPSREEMTKNQVSLTCDVSGFYPSDIAVEWESDGQPENNYKTTPPVLDSDGSFFLYSKLTVDKSRWEQGDVFSCSVLHEALHSHYTQKSLSLSPGK

SEQ ID NO: 3070 - protein, 716 aa, synthetic construct
  source 1..716: note = XENP43640 Chain 2 - XPL2-16G11[PD-L2]_H3.7_6B1_L1_Fab_(G4S)2_1A7[CD28]_H1.14_L1 .71_scFv(GKPGS)4_(G4S)2_Fc(222)_IgG1_PVA_/S267K/S364K/E357Q /M428L/N434S
QVQLQESGPGLVKPSGTLSLTCAVSGGSISSSNWWGWVRQPPGKGLEWIGEIFHIGLTNYNPSLKSRVTISVDKSKNQFSLKLSSVTAADTAVYYCARVSFGDSYYFDYWGQGTLVTVSSASTKGPSVFPLAPSSKSTSGGTAALGCLVKDYFPEPVTVSWNSGALTSGVHTFPAVLQSSGLYSLSSVVTVPSSSLGTQTYICNVNHKPSNTKVDKKVEPKSCGGGGSGGGGSEVQLLESGGGLVQPGGSLRLSCAASGFTFSSYYMSWVRQAPGKGLEWVSTISESGDSTYYADSVKGRFTISRDNSKNTLYLQMNSLRAEDTAVYYCAKSGPGLRQVGFDYWGQGTLVTVSSGKPGSGKPGSGKPGSGKPGSDIQMTQSPSSLSASVGDRVTITCRASQSISSYLNWYQQKPGKAPKLLIYAASSLQSGVPSRFSGSGSGTDFTLTISSLQPEDFATYYCQQVYSTPFTFGQGTKLEIKGGGGSGGGGSKTHTCPPCPAPPVAGPSVFLFPPKPKDTLMISRTPEVTCVVVDVKHEDPEVKFNWYVDGVEVHNAKTKPREEQYNSTYRVVSVLTVLHQDWLNGKEYKCKVSNKALPAPIEKTISKAKGQPREPQVYTLPPSREQMTKNQVKLTCLVKGFYPSDIAVEWESNGQPENNYKTTPPVLDSDGSFFLYSKLTVDKSRWQQGNVFSCSVLHEALHSHYTQKSLSLSPGK

SEQ ID NO: 3071 - protein, 214 aa, synthetic construct; identical to SEQ ID NO: 2686
  source 1..214: note = XENP43640 Chain 3 - 6B1_L1

SEQ ID NO: 3072 - protein, 450 aa, synthetic construct; identical to SEQ ID NO: 3069
  source 1..450: note = XENP43641 Chain 1 - XPL1-13G7[PD-L1]_H2.18_IgG1_PVA_/S267K/S364K/E357Q/M428L/N4 34S

SEQ ID NO: 3073 - protein, 716 aa, synthetic construct
  source 1..716: note = XENP43641 Chain 2 - XPL2-16G11[PD-L2]_H3.7_6B1_L1_Fab_(G4S)2_1A7[CD28]_H1.14_L1 .71_VH_G46C_VL_Q108C_scFv(GKPGS)4_(G4S)2_Fc(222)_IgG1_PVA_/ S267K/S364K/E357Q/M428L/N434S
QVQLQESGPGLVKPSGTLSLTCAVSGGSISSSNWWGWVRQPPGKGLEWIGEIFHIGLTNYNPSLKSRVTISVDKSKNQFSLKLSSVTAADTAVYYCARVSFGDSYYFDYWGQGTLVTVSSASTKGPSVFPLAPSSKSTSGGTAALGCLVKDYFPEPVTVSWNSGALTSGVHTFPAVLQSSGLYSLSSVVTVPSSSLGTQTYICNVNHKPSNTKVDKKVEPKSCGGGGSGGGGSEVQLLESGGGLVQPGGSLRLSCAASGFTFSSYYMSWVRQAPGKCLEWVSTISESGDSTYYADSVKGRFTISRDNSKNTLYLQMNSLRAEDTAVYYCAKSGPGLRQVGFDYWGQGTLVTVSSGKPGSGKPGSGKPGSGKPGSDIQMTQSPSSLSASVGDRVTITCRASQSISSYLNWYQQKPGKAPKLLIYAASSLQSGVPSRFSGSGSGTDFTLTISSLQPEDFATYYCQQVYSTPFTFGCGTKLEIKGGGGSGGGGSKTHTCPPCPAPPVAGPSVFLFPPKPKDTLMISRTPEVTCVVVDVKHEDPEVKFNWYVDGVEVHNAKTKPREEQYNSTYRVVSVLTVLHQDWLNGKEYKCKVSNKALPAPIEKTISKAKGQPREPQVYTLPPSREQMTKNQVKLTCLVKGFYPSDIAVEWESNGQPENNYKTTPPVLDSDGSFFLYSKLTVDKSRWQQGNVFSCSVLHEALHSHYTQKSLSLSPGK

SEQ ID NO: 3074 - protein, 214 aa, synthetic construct; identical to SEQ ID NO: 2686
  source 1..214: note = XENP43641 Chain 3 - 6B1_L1

SEQ ID NO: 3075 - protein, 449 aa, synthetic construct
  source 1..449: note = XENP43643 Chain 1 - XPL2-16G11[PD-L2]_H3.7_IgG1_PVA_/S267K/S364K/E357Q/M428L/N4 34S
QVQLQESGPGLVKPSGTLSLTCAVSGGSISSSNWWGWVRQPPGKGLEWIGEIFHIGLTNYNPSLKSRVTISVDKSKNQFSLKLSSVTAADTAVYYCARVSFGDSYYFDYWGQGTLVTVSSASTKGPSVFPLAPSSKSTSGGTAALGCLVKDYFPEPVTVSWNSGALTSGVHTFPAVLQSSGLYSLSSVVTVPSSSLGTQTYICNVNHKPSDTKVDKKVEPKSCDKTHTCPPCPAPPVAGPSVFLFPPKPKDTLMISRTPEVTCVVVDVKHEDPEVKFNWYVDGVEVHNAKTKPREEEYNSTYRVVSVLTVLHQDWLNGKEYKCKVSNKALPAPIEKTISKAKGQPREPQVYTLPPSREEMTKNQVSLTCDVSGFYPSDIAVEWESDGQPENNYKTTPPVLDSDGSFFLYSKLTVDKSRWEQGDVFSCSVLHEALHSHYTQKSLSLSPGK

SEQ ID NO: 3076 - protein, 717 aa, synthetic construct
  source 1..717: note = XENP43643 Chain 2 - XPL1-13G7[PD-L1]_H2.18_6B1_L1_Fab_(G4S)2_1A7[CD28]_H1.14_L1 .71_scFv(GKPGS)4_(G4S)2_Fc(222)_IgG1_PVA_/S267K/S364K/E357Q /M428L/N434S
QVQLQESGPGLVKPSETLSLTCTVSGGSISGYFWSWIRQPPGKGLEWIGYIYYSGPTNYNPSLKSRVTISVDTSKNQFSLKLSSVTAADTAVYYCARGPLIQLWLAPFDYWGQGTLVTVSSASTKGPSVFPLAPSSKSTSGGTAALGCLVKDYFPEPVTVSWNSGALTSGVHTFPAVLQSSGLYSLSSVVTVPSSSLGTQTYICNVNHKPSNTKVDKKVEPKSCGGGGSGGGGSEVQLLESGGGLVQPGGSLRLSCAASGFTFSSYYMSWVRQAPGKGLEWVSTISESGDSTYYADSVKGRFTISRDNSKNTLYLQMNSLRAEDTAVYYCAKSGPGLRQVGFDYWGQGTLVTVSSGKPGSGKPGSGKPGSGKPGSDIQMTQSPSSLSASVGDRVTITCRASQSISSYLNWYQQKPGKAPKLLIYAASSLQSGVPSRFSGSGSGTDFTLTISSLQPEDFATYYCQQVYSTPFTFGQGTKLEIKGGGGSGGGGSKTHTCPPCPAPPVAGPSVFLFPPKPKDTLMISRTPEVTCVVVDVKHEDPEVKFNWYVDGVEVHNAKTKPREEQYNSTYRVVSVLTVLHQDWLNGKEYKCKVSNKALPAPIEKTISKAKGQPREPQVYTLPPSREQMTKNQVKLTCLVKGFYPSDIAVEWESNGQPENNYKTTPPVLDSDGSFFLYSKLTVDKSRWQQGNVFSCSVLHEALHSHYTQKSLSLSPGK

SEQ ID NO: 3077 - protein, 214 aa, synthetic construct; identical to SEQ ID NO: 2686
  source 1..214: note = XENP43643 Chain 3 - 6B1_L1

SEQ ID NO: 3078 - protein, 449 aa, synthetic construct; identical to SEQ ID NO: 3075
  source 1..449: note = XENP43644 Chain 1 - XPL2-16G11[PD-L2]_H3.7_IgG1_PVA_/S267K/S364K/E357Q/M428L/N4 34S

SEQ ID NO: 3079 - protein, 717 aa, synthetic construct
  source 1..717: note = XENP43644 Chain 2 - XPL1-13G7[PD-L1]_H2.18_6B1_L1_Fab_(G4S)2_1A7[CD28]_H1.14_L1 .71_VH_G46C_VL_Q108C_scFv(GKPGS)4_(G4S)2_Fc(222)_IgG1_PVA_/ S267K/S364K/E357Q/M428L/N434S
QVQLQESGPGLVKPSETLSLTCTVSGGSISGYFWSWIRQPPGKGLEWIGYIYYSGPTNYNPSLKSRVTISVDTSKNQFSLKLSSVTAADTAVYYCARGPLIQLWLAPFDYWGQGTLVTVSSASTKGPSVFPLAPSSKSTSGGTAALGCLVKDYFPEPVTVSWNSGALTSGVHTFPAVLQSSGLYSLSSVVTVPSSSLGTQTYICNVNHKPSNTKVDKKVEPKSCGGGGSGGGGSEVQLLESGGGLVQPGGSLRLSCAASGFTFSSYYMSWVRQAPGKCLEWVSTISESGDSTYYADSVKGRFTISRDNSKNTLYLQMNSLRAEDTAVYYCAKSGPGLRQVGFDYWGQGTLVTVSSGKPGSGKPGSGKPGSGKPGSDIQMTQSPSSLSASVGDRVTITCRASQSISSYLNWYQQKPGKAPKLLIYAASSLQSGVPSRFSGSGSGTDFTLTISSLQPEDFATYYCQQVYSTPFTFGCGTKLEIKGGGGSGGGGSKTHTCPPCPAPPVAGPSVFLFPPKPKDTLMISRTPEVTCVVVDVKHEDPEVKFNWYVDGVEVHNAKTKPREEQYNSTYRVVSVLTVLHQDWLNGKEYKCKVSNKALPAPIEKTISKAKGQPREPQVYTLPPSREQMTKNQVKLTCLVKGFYPSDIAVEWESNGQPENNYKTTPPVLDSDGSFFLYSKLTVDKSRWQQGNVFSCSVLHEALHSHYTQKSLSLSPGK

SEQ ID NO: 3080 - protein, 214 aa, synthetic construct; identical to SEQ ID NO: 2686
  source 1..214: note = XENP43644 Chain 3 - 6B1_L1

SEQ ID NO: 3081 - protein, 451 aa, synthetic construct
  source 1..451: note = XENP43646 Chain 1 - 2A3A4.248[PD-L1]_H1.9_pI(-)_Isosteric_A_PVA_/S267K/L368D/K3 70S/M428L/N434S
QVQLVQSGAEVKKPGSSVKVSCKASGGTFSRYAISWVRQAPGQGLEWMGGIVPAFGYPAYAQKFQGRVTITADESTSTAYMELSSLRSEDTAVYYCARDDWAGPYEWTFDYWGQGTLVTVSSASTKGPSVFPLAPSSKSTSGGTAALGCLVKDYFPEPVTVSWNSGALTSGVHTFPAVLQSSGLYSLSSVVTVPSSSLGTQTYICNVNHKPSDTKVDKKVEPKSCDKTHTCPPCPAPPVAGPSVFLFPPKPKDTLMISRTPEVTCVVVDVKHEDPEVKFNWYVDGVEVHNAKTKPREEEYNSTYRVVSVLTVLHQDWLNGKEYKCKVSNKALPAPIEKTISKAKGQPREPQVYTLPPSREEMTKNQVSLTCDVSGFYPSDIAVEWESDGQPENNYKTTPPVLDSDGSFFLYSKLTVDKSRWEQGDVFSCSVLHEALHSHYTQKSLSLSPGK

SEQ ID NO: 3082 - protein, 716 aa, synthetic construct
  source 1..716: note = XENP43646 Chain 2 - 1F12A4.249[PD-L2]_H1.1_L1_Fab_(G4S)2_1A7[CD28]_H1.14_L1.71_ scFv(GKPGS)4_(G4S)2_Fc(222)_IgG1_PVA_/S267K/S364K/E357Q/M42 8L/N434S
QVQLVQSGAEVKKPGSSVKVSCKASGGTFSNSVMSWVRQAPGQGLEWMGGIIPIFLAVNYAPKFQGRVTITADESTSTAYMELSSLRSEDTAVYYCAREVSRPGTEFDYWGQGTLVTVSSASTKGPSVFPLAPSSKSTSGGTAALGCLVKDYFPEPVTVSWNSGALTSGVHTFPAVLQSSGLYSLSSVVTVPSSSLGTQTYICNVNHKPSNTKVDKKVEPKSCGGGGSGGGGSEVQLLESGGGLVQPGGSLRLSCAASGFTFSSYYMSWVRQAPGKGLEWVSTISESGDSTYYADSVKGRFTISRDNSKNTLYLQMNSLRAEDTAVYYCAKSGPGLRQVGFDYWGQGTLVTVSSGKPGSGKPGSGKPGSGKPGSDIQMTQSPSSLSASVGDRVTITCRASQSISSYLNWYQQKPGKAPKLLIYAASSLQSGVPSRFSGSGSGTDFTLTISSLQPEDFATYYCQQVYSTPFTFGQGTKLEIKGGGGSGGGGSKTHTCPPCPAPPVAGPSVFLFPPKPKDTLMISRTPEVTCVVVDVKHEDPEVKFNWYVDGVEVHNAKTKPREEQYNSTYRVVSVLTVLHQDWLNGKEYKCKVSNKALPAPIEKTISKAKGQPREPQVYTLPPSREQMTKNQVKLTCLVKGFYPSDIAVEWESNGQPENNYKTTPPVLDSDGSFFLYSKLTVDKSRWQQGNVFSCSVLHEALHSHYTQKSLSLSPGK

SEQ ID NO: 3083 - protein, 214 aa, synthetic construct; identical to SEQ ID NO: 2936
  source 1..214: note = XENP43646 Chain 3 - IGKV1-39_L1

SEQ ID NO: 3084 - protein, 451 aa, synthetic construct; identical to SEQ ID NO: 3081
  source 1..451: note = XENP43647 Chain 1 - 2A3A4.248[PD-L1]_H1.9_pI(-)_Isosteric_A_PVA_/S267K/L368D/K3 70S/M428L/N434S

SEQ ID NO: 3085 - protein, 716 aa, synthetic construct
  source 1..716: note = XENP43647 Chain 2 - 1F12A4.249[PD-L2]_H1.1_L1_Fab_(G4S)2_1A7[CD28]_H1.14_L1.71_ VH_G46C_VL_Q108C_scFv(GKPGS)4_(G4S)2_Fc(222)_IgG1_PVA_/S267 K/S364K/E357Q/M428L/N434S
QVQLVQSGAEVKKPGSSVKVSCKASGGTFSNSVMSWVRQAPGQGLEWMGGIIPIFLAVNYAPKFQGRVTITADESTSTAYMELSSLRSEDTAVYYCAREVSRPGTEFDYWGQGTLVTVSSASTKGPSVFPLAPSSKSTSGGTAALGCLVKDYFPEPVTVSWNSGALTSGVHTFPAVLQSSGLYSLSSVVTVPSSSLGTQTYICNVNHKPSNTKVDKKVEPKSCGGGGSGGGGSEVQLLESGGGLVQPGGSLRLSCAASGFTFSSYYMSWVRQAPGKCLEWVSTISESGDSTYYADSVKGRFTISRDNSKNTLYLQMNSLRAEDTAVYYCAKSGPGLRQVGFDYWGQGTLVTVSSGKPGSGKPGSGKPGSGKPGSDIQMTQSPSSLSASVGDRVTITCRASQSISSYLNWYQQKPGKAPKLLIYAASSLQSGVPSRFSGSGSGTDFTLTISSLQPEDFATYYCQQVYSTPFTFGCGTKLEIKGGGGSGGGGSKTHTCPPCPAPPVAGPSVFLFPPKPKDTLMISRTPEVTCVVVDVKHEDPEVKFNWYVDGVEVHNAKTKPREEQYNSTYRVVSVLTVLHQDWLNGKEYKCKVSNKALPAPIEKTISKAKGQPREPQVYTLPPSREQMTKNQVKLTCLVKGFYPSDIAVEWESNGQPENNYKTTPPVLDSDGSFFLYSKLTVDKSRWQQGNVFSCSVLHEALHSHYTQKSLSLSPGK

SEQ ID NO: 3086 - protein, 214 aa, synthetic construct; identical to SEQ ID NO: 2936
  source 1..214: note = XENP43647 Chain 3 - IGKV1-39_L1

SEQ ID NO: 3087 - protein, 449 aa, synthetic construct
  source 1..449: note = XENP43649 Chain 1 - 1F12A4.249[PD-L2]_H1.1_pI(-)_Isosteric_A_PVA_/S267K/L368D/K 370S/M428L/N434S
QVQLVQSGAEVKKPGSSVKVSCKASGGTFSNSVMSWVRQAPGQGLEWMGGIIPIFLAVNYAPKFQGRVTITADESTSTAYMELSSLRSEDTAVYYCAREVSRPGTEFDYWGQGTLVTVSSASTKGPSVFPLAPSSKSTSGGTAALGCLVKDYFPEPVTVSWNSGALTSGVHTFPAVLQSSGLYSLSSVVTVPSSSLGTQTYICNVNHKPSDTKVDKKVEPKSCDKTHTCPPCPAPPVAGPSVFLFPPKPKDTLMISRTPEVTCVVVDVKHEDPEVKFNWYVDGVEVHNAKTKPREEEYNSTYRVVSVLTVLHQDWLNGKEYKCKVSNKALPAPIEKTISKAKGQPREPQVYTLPPSREEMTKNQVSLTCDVSGFYPSDIAVEWESDGQPENNYKTTPPVLDSDGSFFLYSKLTVDKSRWEQGDVFSCSVLHEALHSHYTQKSLSLSPGK

SEQ ID NO: 3088 - protein, 718 aa, synthetic construct
  source 1..718: note = XENP43649 Chain 2 - 2A3A4.248[PD-L1]_H1.9_L1_Fab_(G4S)2_1A7[CD28]_H1.14_L1.71_s cFv(GKPGS)4_(G4S)2_Fc(222)_IgG1_PVA_/S267K/S364K/E357Q/M428 L/N434S
QVQLVQSGAEVKKPGSSVKVSCKASGGTFSRYAISWVRQAPGQGLEWMGGIVPAFGYPAYAQKFQGRVTITADESTSTAYMELSSLRSEDTAVYYCARDDWAGPYEWTFDYWGQGTLVTVSSASTKGPSVFPLAPSSKSTSGGTAALGCLVKDYFPEPVTVSWNSGALTSGVHTFPAVLQSSGLYSLSSVVTVPSSSLGTQTYICNVNHKPSNTKVDKKVEPKSCGGGGSGGGGSEVQLLESGGGLVQPGGSLRLSCAASGFTFSSYYMSWVRQAPGKGLEWVSTISESGDSTYYADSVKGRFTISRDNSKNTLYLQMNSLRAEDTAVYYCAKSGPGLRQVGFDYWGQGTLVTVSSGKPGSGKPGSGKPGSGKPGSDIQMTQSPSSLSASVGDRVTITCRASQSISSYLNWYQQKPGKAPKLLIYAASSLQSGVPSRFSGSGSGTDFTLTISSLQPEDFATYYCQQVYSTPFTFGQGTKLEIKGGGGSGGGGSKTHTCPPCPAPPVAGPSVFLFPPKPKDTLMISRTPEVTCVVVDVKHEDPEVKFNWYVDGVEVHNAKTKPREEQYNSTYRVVSVLTVLHQDWLNGKEYKCKVSNKALPAPIEKTISKAKGQPREPQVYTLPPSREQMTKNQVKLTCLVKGFYPSDIAVEWESNGQPENNYKTTPPVLDSDGSFFLYSKLTVDKSRWQQGNVFSCSVLHEALHSHYTQKSLSLSPGK

SEQ ID NO: 3089 - protein, 214 aa, synthetic construct; identical to SEQ ID NO: 2936
  source 1..214: note = XENP43649 Chain 3 - IGKV1-39_L1

SEQ ID NO: 3090 - protein, 449 aa, synthetic construct; identical to SEQ ID NO: 3087
  source 1..449: note = XENP43650 Chain 1 - 1F12A4.249[PD-L2]_H1.1_pI(-)_Isosteric_A_PVA_/S267K/L368D/K 370S/M428L/N434S

SEQ ID NO: 3091 - protein, 718 aa, synthetic construct
  source 1..718: note = XENP43650 Chain 2 - 2A3A4.248[PD-L1]_H1.9_L1_Fab_(G4S)2_1A7[CD28]_H1.14_L1.71_V H_G46C_VL_Q108C_scFv(GKPGS)4_(G4S)2_Fc(222)_IgG1_PVA_/S267K /S364K/E357Q/M428L/N434S
QVQLVQSGAEVKKPGSSVKVSCKASGGTFSRYAISWVRQAPGQGLEWMGGIVPAFGYPAYAQKFQGRVTITADESTSTAYMELSSLRSEDTAVYYCARDDWAGPYEWTFDYWGQGTLVTVSSASTKGPSVFPLAPSSKSTSGGTAALGCLVKDYFPEPVTVSWNSGALTSGVHTFPAVLQSSGLYSLSSVVTVPSSSLGTQTYICNVNHKPSNTKVDKKVEPKSCGGGGSGGGGSEVQLLESGGGLVQPGGSLRLSCAASGFTFSSYYMSWVRQAPGKCLEWVSTISESGDSTYYADSVKGRFTISRDNSKNTLYLQMNSLRAEDTAVYYCAKSGPGLRQVGFDYWGQGTLVTVSSGKPGSGKPGSGKPGSGKPGSDIQMTQSPSSLSASVGDRVTITCRASQSISSYLNWYQQKPGKAPKLLIYAASSLQSGVPSRFSGSGSGTDFTLTISSLQPEDFATYYCQQVYSTPFTFGCGTKLEIKGGGGSGGGGSKTHTCPPCPAPPVAGPSVFLFPPKPKDTLMISRTPEVTCVVVDVKHEDPEVKFNWYVDGVEVHNAKTKPREEQYNSTYRVVSVLTVLHQDWLNGKEYKCKVSNKALPAPIEKTISKAKGQPREPQVYTLPPSREQMTKNQVKLTCLVKGFYPSDIAVEWESNGQPENNYKTTPPVLDSDGSFFLYSKLTVDKSRWQQGNVFSCSVLHEALHSHYTQKSLSLSPGK

SEQ ID NO: 3092 - protein, 214 aa, synthetic construct; identical to SEQ ID NO: 2936
  source 1..214: note = XENP43650 Chain 3 - IGKV1-39_L1

SEQ ID NO: 3093 - protein, 449 aa, synthetic construct
  source 1..449: note = XENP38541 Chain 1 - 1F12A4.249[PD-L2]_H1_IgG1_pI(-)_Isosteric_A_/PVA_/S267K/L36 8D/K370S
QVQLVQSGAEVKKPGSSVKVSCKASGGTFSNYVISWVRQAPGQGLEWMGGIIPIFGAVNYAPKFQGRVTITADESTSTAYMELSSLRSEDTAVYYCAREVSRPGTEFDYWGQGTLVTVSSASTKGPSVFPLAPSSKSTSGGTAALGCLVKDYFPEPVTVSWNSGALTSGVHTFPAVLQSSGLYSLSSVVTVPSSSLGTQTYICNVNHKPSDTKVDKKVEPKSCDKTHTCPPCPAPPVAGPSVFLFPPKPKDTLMISRTPEVTCVVVDVKHEDPEVKFNWYVDGVEVHNAKTKPREEEYNSTYRVVSVLTVLHQDWLNGKEYKCKVSNKALPAPIEKTISKAKGQPREPQVYTLPPSREEMTKNQVSLTCDVSGFYPSDIAVEWESDGQPENNYKTTPPVLDSDGSFFLYSKLTVDKSRWEQGDVFSCSVMHEALHNHYTQKSLSLSPGK

SEQ ID NO: 3094 - protein, 713 aa, synthetic construct
  source 1..713: note = XENP38541 Chain 2 - 2A3A4.248[PD-L1]_H1_IgG1_PVA_/S267K/S364K/E357Q/K447del_(G4 S)3_1A7[CD28]_H1.14_L1.71_scFv(GKPGS)4
QVQLVQSGAEVKKPGSSVKVSCKASGGTFSRYAISWVRQAPGQGLEWMGGIVPIFGKPNYAQKFQGRVTITADESTSTAYMELSSLRSEDTAVYYCARDDWAGPYEWTFDYWGQGTLVTVSSASTKGPSVFPLAPSSKSTSGGTAALGCLVKDYFPEPVTVSWNSGALTSGVHTFPAVLQSSGLYSLSSVVTVPSSSLGTQTYICNVNHKPSNTKVDKKVEPKSCDKTHTCPPCPAPPVAGPSVFLFPPKPKDTLMISRTPEVTCVVVDVKHEDPEVKFNWYVDGVEVHNAKTKPREEQYNSTYRVVSVLTVLHQDWLNGKEYKCKVSNKALPAPIEKTISKAKGQPREPQVYTLPPSREQMTKNQVKLTCLVKGFYPSDIAVEWESNGQPENNYKTTPPVLDSDGSFFLYSKLTVDKSRWQQGNVFSCSVMHEALHNHYTQKSLSLSPGGGGGSGGGGSGGGGSEVQLLESGGGLVQPGGSLRLSCAASGFTFSSYYMSWVRQAPGKGLEWVSTISESGDSTYYADSVKGRFTISRDNSKNTLYLQMNSLRAEDTAVYYCAKSGPGLRQVGFDYWGQGTLVTVSSGKPGSGKPGSGKPGSGKPGSDIQMTQSPSSLSASVGDRVTITCRASQSISSYLNWYQQKPGKAPKLLIYAASSLQSGVPSRFSGSGSGTDFTLTISSLQPEDFATYYCQQVYSTPFTFGQGTKLEIK

SEQ ID NO: 3095 - protein, 214 aa, synthetic construct; identical to SEQ ID NO: 2936
  source 1..214: note = XENP38541 Chain 3 - IGKV1-39_L1

SEQ ID NO: 3096 - protein, 454 aa, synthetic construct; identical to SEQ ID NO: 2913
  source 1..454: note = XENP42340 Chain 1 - XPL1-13G1[PD-L1]_H1_IgG1_pI(-)_Isosteric_A_PVA_/S267K/L368D /K370S

SEQ ID NO: 3097 - protein, 715 aa, synthetic construct
  source 1..715: note = XENP42340 Chain 2 - XPL2-5C11[PD-L2]_H2_IgG1_PVA_/S267K/S364K/E357Q/H435R/Y436F /K447del_(G4S)3_1A7[CD28]_H1.14_L1.71_scFv(GKPGS)4
QVQLVQSGAEVKKPGSSVKVSCKASGGTFRNYAITWVRQAPGQGLEWMGRIIPILAIANYAQKFQGRVTITADKSTSTVYMELSSLRSEDTAVYYCATDLGIAAAGRAEYFQHWGQGTLVTVSSASTKGPSVFPLAPSSKSTSGGTAALGCLVKDYFPEPVTVSWNSGALTSGVHTFPAVLQSSGLYSLSSVVTVPSSSLGTQTYICNVNHKPSNTKVDKKVEPKSCDKTHTCPPCPAPPVAGPSVFLFPPKPKDTLMISRTPEVTCVVVDVKHEDPEVKFNWYVDGVEVHNAKTKPREEQYNSTYRVVSVLTVLHQDWLNGKEYKCKVSNKALPAPIEKTISKAKGQPREPQVYTLPPSREQMTKNQVKLTCLVKGFYPSDIAVEWESNGQPENNYKTTPPVLDSDGSFFLYSKLTVDKSRWQQGNVFSCSVMHEALHNRFTQKSLSLSPGGGGGSGGGGSGGGGSEVQLLESGGGLVQPGGSLRLSCAASGFTFSSYYMSWVRQAPGKGLEWVSTISESGDSTYYADSVKGRFTISRDNSKNTLYLQMNSLRAEDTAVYYCAKSGPGLRQVGFDYWGQGTLVTVSSGKPGSGKPGSGKPGSGKPGSDIQMTQSPSSLSASVGDRVTITCRASQSISSYLNWYQQKPGKAPKLLIYAASSLQSGVPSRFSGSGSGTDFTLTISSLQPEDFATYYCQQVYSTPFTFGQGTKLEIK

SEQ ID NO: 3098 - protein, 214 aa, synthetic construct; identical to SEQ ID NO: 2686
  source 1..214: note = XENP42340 Chain 3 - XPL1-6B1_L1

SEQ ID NO: 3099 - protein, 454 aa, synthetic construct; identical to SEQ ID NO: 2913
  source 1..454: note = XENP42341 Chain 1 - XPL1-13G1[PD-L1]_H1_IgG1_pI(-)_Isosteric_A_PVA_/S267K/L368D /K370S

SEQ ID NO: 3100 - protein, 716 aa, synthetic construct
  source 1..716: note = XENP42341 Chain 2 - XPL2-8G2[PD-L2]_H2_IgG1_PVA_/S267K/S364K/E357Q/H435R/Y436F/ K447del_(G4S)3_1A7[CD28]_H1.14_L1.71_scFv(GKPGS)4
QVQLVQSGAEVKKPGSSVKVSCKASGVNFRNYAISWVRQAPGQGLEWMGRIIPVVGKAHYEQKFQGRVTITADKSTTTAYMELSSLRSEDTAVYYCARDGPGIGVAGRGYYFDYWGQGTLVTVSSASTKGPSVFPLAPSSKSTSGGTAALGCLVKDYFPEPVTVSWNSGALTSGVHTFPAVLQSSGLYSLSSVVTVPSSSLGTQTYICNVNHKPSNTKVDKKVEPKSCDKTHTCPPCPAPPVAGPSVFLFPPKPKDTLMISRTPEVTCVVVDVKHEDPEVKFNWYVDGVEVHNAKTKPREEQYNSTYRVVSVLTVLHQDWLNGKEYKCKVSNKALPAPIEKTISKAKGQPREPQVYTLPPSREQMTKNQVKLTCLVKGFYPSDIAVEWESNGQPENNYKTTPPVLDSDGSFFLYSKLTVDKSRWQQGNVFSCSVMHEALHNRFTQKSLSLSPGGGGGSGGGGSGGGGSEVQLLESGGGLVQPGGSLRLSCAASGFTFSSYYMSWVRQAPGKGLEWVSTISESGDSTYYADSVKGRFTISRDNSKNTLYLQMNSLRAEDTAVYYCAKSGPGLRQVGFDYWGQGTLVTVSSGKPGSGKPGSGKPGSGKPGSDIQMTQSPSSLSASVGDRVTITCRASQSISSYLNWYQQKPGKAPKLLIYAASSLQSGVPSRFSGSGSGTDFTLTISSLQPEDFATYYCQQVYSTPFTFGQGTKLEIK

SEQ ID NO: 3101 - protein, 214 aa, synthetic construct; identical to SEQ ID NO: 2686
  source 1..214: note = XENP42341 Chain 3 - XPL1-6B1_L1

SEQ ID NO: 3102 - protein, 454 aa, synthetic construct; identical to SEQ ID NO: 2913
  source 1..454: note = XENP42342 Chain 1 - XPL1-13G1[PD-L1]_H1_IgG1_pI(-)_Isosteric_A_PVA_/S267K/L368D /K370S

SEQ ID NO: 3103 - protein, 715 aa, synthetic construct
  source 1..715: note = XENP42342 Chain 2 - XPL2-8G5[PD-L2]_H3_IgG1_PVA_/S267K/S364K/E357Q/H435R/Y436F/ K447del_(G4S)3_1A7[CD28]_H1.14_L1.71_scFv(GKPGS)4
QVQLVQSGAEVKKPGSSVKVSCKASGGSLRNYAISWVRQAPGQGLEWMGRIIYILGIANYAQKFQGRVTITADKSTSTAYMELSSLRSEDTAVYYCARSGSQQLIEGADAFDIWGQGTMVTVSSASTKGPSVFPLAPSSKSTSGGTAALGCLVKDYFPEPVTVSWNSGALTSGVHTFPAVLQSSGLYSLSSVVTVPSSSLGTQTYICNVNHKPSNTKVDKKVEPKSCDKTHTCPPCPAPPVAGPSVFLFPPKPKDTLMISRTPEVTCVVVDVKHEDPEVKFNWYVDGVEVHNAKTKPREEQYNSTYRVVSVLTVLHQDWLNGKEYKCKVSNKALPAPIEKTISKAKGQPREPQVYTLPPSREQMTKNQVKLTCLVKGFYPSDIAVEWESNGQPENNYKTTPPVLDSDGSFFLYSKLTVDKSRWQQGNVFSCSVMHEALHNRFTQKSLSLSPGGGGGSGGGGSGGGGSEVQLLESGGGLVQPGGSLRLSCAASGFTFSSYYMSWVRQAPGKGLEWVSTISESGDSTYYADSVKGRFTISRDNSKNTLYLQMNSLRAEDTAVYYCAKSGPGLRQVGFDYWGQGTLVTVSSGKPGSGKPGSGKPGSGKPGSDIQMTQSPSSLSASVGDRVTITCRASQSISSYLNWYQQKPGKAPKLLIYAASSLQSGVPSRFSGSGSGTDFTLTISSLQPEDFATYYCQQVYSTPFTFGQGTKLEIK

SEQ ID NO: 3104 - protein, 214 aa, synthetic construct; identical to SEQ ID NO: 2686
  source 1..214: note = XENP42342 Chain 3 - XPL1-6B1_L1

SEQ ID NO: 3105 - protein, 454 aa, synthetic construct; identical to SEQ ID NO: 2913
  source 1..454: note = XENP42343 Chain 1 - XPL1-13G1[PD-L1]_H1_IgG1_pI(-)_Isosteric_A_PVA_/S267K/L368D /K370S

SEQ ID NO: 3106 - protein, 711 aa, synthetic construct
  source 1..711: note = XENP42343 Chain 2 - XPL2-16G11[PD-L2]_H2_IgG1_PVA_/S267K/S364K/E357Q/H435R/Y436 F/K447del_(G4S)3_1A7[CD28]_H1.14_L1.71_scFv(GKPGS)4
QVQLQESGSGLVKPPGTLSLTCAVSGGSISSSNWWSWVRQPPGKGLEWIGEIFHIGSTNYNPSLKSRVTISVDKSKNQFSLKLSSVTAADTAVYYCARVSFGDSYYFDYWGQGTLVTVSSASTKGPSVFPLAPSSKSTSGGTAALGCLVKDYFPEPVTVSWNSGALTSGVHTFPAVLQSSGLYSLSSVVTVPSSSLGTQTYICNVNHKPSNTKVDKKVEPKSCDKTHTCPPCPAPPVAGPSVFLFPPKPKDTLMISRTPEVTCVVVDVKHEDPEVKFNWYVDGVEVHNAKTKPREEQYNSTYRVVSVLTVLHQDWLNGKEYKCKVSNKALPAPIEKTISKAKGQPREPQVYTLPPSREQMTKNQVKLTCLVKGFYPSDIAVEWESNGQPENNYKTTPPVLDSDGSFFLYSKLTVDKSRWQQGNVFSCSVMHEALHNRFTQKSLSLSPGGGGGSGGGGSGGGGSEVQLLESGGGLVQPGGSLRLSCAASGFTFSSYYMSWVRQAPGKGLEWVSTISESGDSTYYADSVKGRFTISRDNSKNTLYLQMNSLRAEDTAVYYCAKSGPGLRQVGFDYWGQGTLVTVSSGKPGSGKPGSGKPGSGKPGSDIQMTQSPSSLSASVGDRVTITCRASQSISSYLNWYQQKPGKAPKLLIYAASSLQSGVPSRFSGSGSGTDFTLTISSLQPEDFATYYCQQVYSTPFTFGQGTKLEIK

SEQ ID NO: 3107 - protein, 214 aa, synthetic construct; identical to SEQ ID NO: 2686
  source 1..214: note = XENP42343 Chain 3 - XPL1-6B1_L1

SEQ ID NO: 3108 - protein, 450 aa, synthetic construct; identical to SEQ ID NO: 2919
  source 1..450: note = XENP42344 Chain 1 - XPL1-13G7[PD-L1]_H2_IgG1_pI(-)_Isosteric_A_PVA_/S267K/L368D /K370S

SEQ ID NO: 3109 - protein, 715 aa, synthetic construct; identical to SEQ ID NO: 3097
  source 1..715: note = XENP42344 Chain 2 - XPL2-5C11[PD-L2]_H2_IgG1_PVA_/S267K/S364K/E357Q/H435R/Y436F /K447del_(G4S)3_1A7[CD28]_H1.14_L1.71_scFv(GKPGS)4

SEQ ID NO: 3110 - protein, 214 aa, synthetic construct; identical to SEQ ID NO: 2686
  source 1..214: note = XENP42344 Chain 3 - XPL1-6B1_L1

SEQ ID NO: 3111 - protein, 450 aa, synthetic construct; identical to SEQ ID NO: 2919
  source 1..450: note = XENP42345 Chain 1 - XPL1-13G7[PD-L1]_H2_IgG1_pI(-)_Isosteric_A_PVA_/S267K/L368D /K370S

SEQ ID NO: 3112 - protein, 716 aa, synthetic construct; identical to SEQ ID NO: 3100
  source 1..716: note = XENP42345 Chain 2 - XPL2-8G2[PD-L2]_H2_IgG1_PVA_/S267K/S364K/E357Q/H435R/Y436F/ K447del_(G4S)3_1A7[CD28]_H1.14_L1.71_scFv(GKPGS)4

SEQ ID NO: 3113 - protein, 214 aa, synthetic construct; identical to SEQ ID NO: 2686
  source 1..214: note = XENP42345 Chain 3 - XPL1-6B1_L1

SEQ ID NO: 3114 - protein, 450 aa, synthetic construct; identical to SEQ ID NO: 2919
  source 1..450: note = XENP42346 Chain 1 - XPL1-13G7[PD-L1]_H2_IgG1_pI(-)_Isosteric_A_PVA_/S267K/L368D /K370S

SEQ ID NO: 3115 - protein, 715 aa, synthetic construct; identical to SEQ ID NO: 3103
  source 1..715: note = XENP42346 Chain 2 - XPL2-8G5[PD-L2]_H3_IgG1_PVA_/S267K/S364K/E357Q/H435R/Y436F/ K447del_(G4S)3_1A7[CD28]_H1.14_L1.71_scFv(GKPGS)4

SEQ ID NO: 3116 - protein, 214 aa, synthetic construct; identical to SEQ ID NO: 2686
  source 1..214: note = XENP42346 Chain 3 - XPL1-6B1_L1

SEQ ID NO: 3117 - protein, 450 aa, synthetic construct; identical to SEQ ID NO: 2919
  source 1..450: note = XENP42347 Chain 1 - XPL1-13G7[PD-L1]_H2_IgG1_pI(-)_Isosteric_A_PVA_/S267K/L368D /K370S

SEQ ID NO: 3118 - protein, 711 aa, synthetic construct; identical to SEQ ID NO: 3106
  source 1..711: note = XENP42347 Chain 2 - XPL2-16G11[PD-L2]_H2_IgG1_PVA_/S267K/S364K/E357Q/H435R/Y436 F/K447del_(G4S)3_1A7[CD28]_H1.14_L1.71_scFv(GKPGS)4

SEQ ID NO: 3119 - protein, 214 aa, synthetic construct; identical to SEQ ID NO: 2686
  source 1..214: note = XENP42347 Chain 3 - XPL1-6B1_L1

SEQ ID NO: 3120 - protein, 450 aa, synthetic construct; identical to SEQ ID NO: 3069
  source 1..450: note = XENP43400 Chain 1 - XPL1-13G7[PD-L1]_H2.18_IgG1_pI(-)_Isosteric_A_PVA_/S267K/L3 68D/K370S/M428L/N434S

SEQ ID NO: 3121 - protein, 682 aa, synthetic construct
  source 1..682: note = XENP43400 Chain 2 - XPL2-16G11[PD-L2]_H3.7_(GKPGS)2_1A3.88474[CD28]_H1_IgG1_PVA _/S267K/S364K/E357Q/M428L/N434S
QVQLQESGPGLVKPSGTLSLTCAVSGGSISSSNWWGWVRQPPGKGLEWIGEIFHIGLTNYNPSLKSRVTISVDKSKNQFSLKLSSVTAADTAVYYCARVSFGDSYYFDYWGQGTLVTVSSASTKGPSVFPLAPSSKSTSGGTAALGCLVKDYFPEPVTVSWNSGALTSGVHTFPAVLQSSGLYSLSSVVTVPSSSLGTQTYICNVNHKPSNTKVDKKVEPKSCGKPGSGKPGSEVQLVESGGGLVQPGGSLRLSCAAFGFTFSNYWMHWVRQAPGKGLVWVSRINSDGSSASFADSVRGRFTISRDNAKNTLYLQLNSLRAEDTAVYYCARADSSSWYLFDNWGQGTLVTVSSASTKGPSVFPLAPSSKSTSGGTAALGCLVKDYFPEPVTVSWNSGALTSGVHTFPAVLQSSGLYSLSSVVTVPSSSLGTQTYICNVNHKPSNTKVDKKVEPKSCDKTHTCPPCPAPPVAGPSVFLFPPKPKDTLMISRTPEVTCVVVDVKHEDPEVKFNWYVDGVEVHNAKTKPREEQYNSTYRVVSVLTVLHQDWLNGKEYKCKVSNKALPAPIEKTISKAKGQPREPQVYTLPPSREQMTKNQVKLTCLVKGFYPSDIAVEWESNGQPENNYKTTPPVLDSDGSFFLYSKLTVDKSRWQQGNVFSCSVLHEALHSHYTQKSLSLSPGK

SEQ ID NO: 3122 - protein, 214 aa, synthetic construct; identical to SEQ ID NO: 2686
  source 1..214: note = XENP43400 Chain 3 - 6B1_L1

SEQ ID NO: 3123 - protein, 450 aa, synthetic construct; identical to SEQ ID NO: 3069
  source 1..450: note = XENP43401 Chain 1 - XPL1-13G7[PD-L1]_H2.18_IgG1_pI(-)_Isosteric_A_PVA_/S267K/L3 68D/K370S/M428L/N434S

SEQ ID NO: 3124 - protein, 687 aa, synthetic construct
  source 1..687: note = XENP43401 Chain 2 - XPL2-8G2[PD-L2]_H2_(GKPGS)2_1A3.88474[CD28]_H1_IgG1_PVA_/S2 67K/S364K/E357Q/M428L/N434S
QVQLVQSGAEVKKPGSSVKVSCKASGVNFRNYAISWVRQAPGQGLEWMGRIIPVVGKAHYEQKFQGRVTITADKSTTTAYMELSSLRSEDTAVYYCARDGPGIGVAGRGYYFDYWGQGTLVTVSSASTKGPSVFPLAPSSKSTSGGTAALGCLVKDYFPEPVTVSWNSGALTSGVHTFPAVLQSSGLYSLSSVVTVPSSSLGTQTYICNVNHKPSNTKVDKKVEPKSCGKPGSGKPGSEVQLVESGGGLVQPGGSLRLSCAAFGFTFSNYWMHWVRQAPGKGLVWVSRINSDGSSASFADSVRGRFTISRDNAKNTLYLQLNSLRAEDTAVYYCARADSSSWYLFDNWGQGTLVTVSSASTKGPSVFPLAPSSKSTSGGTAALGCLVKDYFPEPVTVSWNSGALTSGVHTFPAVLQSSGLYSLSSVVTVPSSSLGTQTYICNVNHKPSNTKVDKKVEPKSCDKTHTCPPCPAPPVAGPSVFLFPPKPKDTLMISRTPEVTCVVVDVKHEDPEVKFNWYVDGVEVHNAKTKPREEQYNSTYRVVSVLTVLHQDWLNGKEYKCKVSNKALPAPIEKTISKAKGQPREPQVYTLPPSREQMTKNQVKLTCLVKGFYPSDIAVEWESNGQPENNYKTTPPVLDSDGSFFLYSKLTVDKSRWQQGNVFSCSVLHEALHSHYTQKSLSLSPGK

SEQ ID NO: 3125 - protein, 214 aa, synthetic construct; identical to SEQ ID NO: 2686
  source 1..214: note = XENP43401 Chain 3 - 6B1_L1

SEQ ID NO: 3126 - protein, 450 aa, synthetic construct; identical to SEQ ID NO: 3069
  source 1..450: note = XENP43402 Chain 1 - XPL1-13G7[PD-L1]_H2.18_IgG1_pI(-)_Isosteric_A_PVA_/S267K/L3 68D/K370S/M428L/N434S

SEQ ID NO: 3127 - protein, 682 aa, synthetic construct
  source 1..682: note = XENP43402 Chain 2 - 1A3.88474[CD28]_H1_(GKPGS)2_XPL2-16G11[PD-L2]_H3.7_IgG1_PVA _/S267K/S364K/E357Q/M428L/N434S
EVQLVESGGGLVQPGGSLRLSCAAFGFTFSNYWMHWVRQAPGKGLVWVSRINSDGSSASFADSVRGRFTISRDNAKNTLYLQLNSLRAEDTAVYYCARADSSSWYLFDNWGQGTLVTVSSASTKGPSVFPLAPSSKSTSGGTAALGCLVKDYFPEPVTVSWNSGALTSGVHTFPAVLQSSGLYSLSSVVTVPSSSLGTQTYICNVNHKPSNTKVDKKVEPKSCGKPGSGKPGSQVQLQESGPGLVKPSGTLSLTCAVSGGSISSSNWWGWVRQPPGKGLEWIGEIFHIGLTNYNPSLKSRVTISVDKSKNQFSLKLSSVTAADTAVYYCARVSFGDSYYFDYWGQGTLVTVSSASTKGPSVFPLAPSSKSTSGGTAALGCLVKDYFPEPVTVSWNSGALTSGVHTFPAVLQSSGLYSLSSVVTVPSSSLGTQTYICNVNHKPSNTKVDKKVEPKSCDKTHTCPPCPAPPVAGPSVFLFPPKPKDTLMISRTPEVTCVVVDVKHEDPEVKFNWYVDGVEVHNAKTKPREEQYNSTYRVVSVLTVLHQDWLNGKEYKCKVSNKALPAPIEKTISKAKGQPREPQVYTLPPSREQMTKNQVKLTCLVKGFYPSDIAVEWESNGQPENNYKTTPPVLDSDGSFFLYSKLTVDKSRWQQGNVFSCSVLHEALHSHYTQKSLSLSPGK

SEQ ID NO: 3128 - protein, 214 aa, synthetic construct; identical to SEQ ID NO: 2686
  source 1..214: note = XENP43402 Chain 3 - 6B1_L1

SEQ ID NO: 3129 - protein, 450 aa, synthetic construct; identical to SEQ ID NO: 3069
  source 1..450: note = XENP43403 Chain 1 - XPL1-13G7[PD-L1]_H2.18_IgG1_pI(-)_Isosteric_A_PVA_/S267K/L3 68D/K370S/M428L/N434S

SEQ ID NO: 3130 - protein, 687 aa, synthetic construct
  source 1..687: note = XENP43403 Chain 2 - 1A3.88474[CD28]_H1_(GKPGS)2_XPL2-8G2[PD-L2]_H2_IgG1_PVA_/S2 67K/S364K/E357Q/M428L/N434S
EVQLVESGGGLVQPGGSLRLSCAAFGFTFSNYWMHWVRQAPGKGLVWVSRINSDGSSASFADSVRGRFTISRDNAKNTLYLQLNSLRAEDTAVYYCARADSSSWYLFDNWGQGTLVTVSSASTKGPSVFPLAPSSKSTSGGTAALGCLVKDYFPEPVTVSWNSGALTSGVHTFPAVLQSSGLYSLSSVVTVPSSSLGTQTYICNVNHKPSNTKVDKKVEPKSCGKPGSGKPGSQVQLVQSGAEVKKPGSSVKVSCKASGVNFRNYAISWVRQAPGQGLEWMGRIIPVVGKAHYEQKFQGRVTITADKSTTTAYMELSSLRSEDTAVYYCARDGPGIGVAGRGYYFDYWGQGTLVTVSSASTKGPSVFPLAPSSKSTSGGTAALGCLVKDYFPEPVTVSWNSGALTSGVHTFPAVLQSSGLYSLSSVVTVPSSSLGTQTYICNVNHKPSNTKVDKKVEPKSCDKTHTCPPCPAPPVAGPSVFLFPPKPKDTLMISRTPEVTCVVVDVKHEDPEVKFNWYVDGVEVHNAKTKPREEQYNSTYRVVSVLTVLHQDWLNGKEYKCKVSNKALPAPIEKTISKAKGQPREPQVYTLPPSREQMTKNQVKLTCLVKGFYPSDIAVEWESNGQPENNYKTTPPVLDSDGSFFLYSKLTVDKSRWQQGNVFSCSVLHEALHSHYTQKSLSLSPGK

SEQ ID NO: 3131 - protein, 214 aa, synthetic construct; identical to SEQ ID NO: 2686
  source 1..214: note = XENP43403 Chain 3 - 6B1_L1

SEQ ID NO: 3132 - protein, 449 aa, synthetic construct; identical to SEQ ID NO: 3075
  source 1..449: note = XENP43404 Chain 1 - XPL2-16G11[PD-L2]_H3.7_IgG1_pI(-)_Isosteric_A_PVA_/S267K/L3 68D/K370S/M428L/N434S

SEQ ID NO: 3133 - protein, 683 aa, synthetic construct
  source 1..683: note = XENP43404 Chain 2 - XPL1-13G7[PD-L1]_H2.18_Fab_(GKPGS)2_1A3.88474[CD28]_H1_IgG1 _PVA_/S267K/S364K/E357Q/M428L/N434S
QVQLQESGPGLVKPSETLSLTCTVSGGSISGYFWSWIRQPPGKGLEWIGYIYYSGPTNYNPSLKSRVTISVDTSKNQFSLKLSSVTAADTAVYYCARGPLIQLWLAPFDYWGQGTLVTVSSASTKGPSVFPLAPSSKSTSGGTAALGCLVKDYFPEPVTVSWNSGALTSGVHTFPAVLQSSGLYSLSSVVTVPSSSLGTQTYICNVNHKPSNTKVDKKVEPKSCGKPGSGKPGSEVQLVESGGGLVQPGGSLRLSCAAFGFTFSNYWMHWVRQAPGKGLVWVSRINSDGSSASFADSVRGRFTISRDNAKNTLYLQLNSLRAEDTAVYYCARADSSSWYLFDNWGQGTLVTVSSASTKGPSVFPLAPSSKSTSGGTAALGCLVKDYFPEPVTVSWNSGALTSGVHTFPAVLQSSGLYSLSSVVTVPSSSLGTQTYICNVNHKPSNTKVDKKVEPKSCDKTHTCPPCPAPPVAGPSVFLFPPKPKDTLMISRTPEVTCVVVDVKHEDPEVKFNWYVDGVEVHNAKTKPREEQYNSTYRVVSVLTVLHQDWLNGKEYKCKVSNKALPAPIEKTISKAKGQPREPQVYTLPPSREQMTKNQVKLTCLVKGFYPSDIAVEWESNGQPENNYKTTPPVLDSDGSFFLYSKLTVDKSRWQQGNVFSCSVLHEALHSHYTQKSLSLSPGK

SEQ ID NO: 3134 - protein, 214 aa, synthetic construct; identical to SEQ ID NO: 2686
  source 1..214: note = XENP43404 Chain 3 - 6B1_L1

SEQ ID NO: 3135 - protein, 449 aa, synthetic construct; identical to SEQ ID NO: 3075
  source 1..449: note = XENP43405 Chain 1 - XPL2-16G11[PD-L2]_H3.7_IgG1_pI(-)_Isosteric_A_PVA_/S267K/L3 68D/K370S/M428L/N434S

SEQ ID NO: 3136 - protein, 683 aa, synthetic construct
  source 1..683: note = XENP43405 Chain 2 - XPL2-1A3.88474[CD28]_H1_(GKPGS)2_XPL1-13G7[PD-L1]_H2.18_IgG 1_PVA_/S267K/S364K/E357Q/M428L/N434S
EVQLVESGGGLVQPGGSLRLSCAAFGFTFSNYWMHWVRQAPGKGLVWVSRINSDGSSASFADSVRGRFTISRDNAKNTLYLQLNSLRAEDTAVYYCARADSSSWYLFDNWGQGTLVTVSSASTKGPSVFPLAPSSKSTSGGTAALGCLVKDYFPEPVTVSWNSGALTSGVHTFPAVLQSSGLYSLSSVVTVPSSSLGTQTYICNVNHKPSNTKVDKKVEPKSCGKPGSGKPGSQVQLQESGPGLVKPSETLSLTCTVSGGSISGYFWSWIRQPPGKGLEWIGYIYYSGPTNYNPSLKSRVTISVDTSKNQFSLKLSSVTAADTAVYYCARGPLIQLWLAPFDYWGQGTLVTVSSASTKGPSVFPLAPSSKSTSGGTAALGCLVKDYFPEPVTVSWNSGALTSGVHTFPAVLQSSGLYSLSSVVTVPSSSLGTQTYICNVNHKPSNTKVDKKVEPKSCDKTHTCPPCPAPPVAGPSVFLFPPKPKDTLMISRTPEVTCVVVDVKHEDPEVKFNWYVDGVEVHNAKTKPREEQYNSTYRVVSVLTVLHQDWLNGKEYKCKVSNKALPAPIEKTISKAKGQPREPQVYTLPPSREQMTKNQVKLTCLVKGFYPSDIAVEWESNGQPENNYKTTPPVLDSDGSFFLYSKLTVDKSRWQQGNVFSCSVLHEALHSHYTQKSLSLSPGK

SEQ ID NO: 3137 - protein, 214 aa, synthetic construct; identical to SEQ ID NO: 2686
  source 1..214: note = XENP43405 Chain 3 - 6B1_L1

SEQ ID NO: 3138 - protein, 449 aa, synthetic construct
  source 1..449: note = XENP43452 Chain 1 - 1A3.88474[CD28]_H1_IgG1_pI(-)_Isosteric_A_PVA_/S267K/L368D/ K370S/M428L/N434S
EVQLVESGGGLVQPGGSLRLSCAAFGFTFSNYWMHWVRQAPGKGLVWVSRINSDGSSASFADSVRGRFTISRDNAKNTLYLQLNSLRAEDTAVYYCARADSSSWYLFDNWGQGTLVTVSSASTKGPSVFPLAPSSKSTSGGTAALGCLVKDYFPEPVTVSWNSGALTSGVHTFPAVLQSSGLYSLSSVVTVPSSSLGTQTYICNVNHKPSDTKVDKKVEPKSCDKTHTCPPCPAPPVAGPSVFLFPPKPKDTLMISRTPEVTCVVVDVKHEDPEVKFNWYVDGVEVHNAKTKPREEEYNSTYRVVSVLTVLHQDWLNGKEYKCKVSNKALPAPIEKTISKAKGQPREPQVYTLPPSREEMTKNQVSLTCDVSGFYPSDIAVEWESDGQPENNYKTTPPVLDSDGSFFLYSKLTVDKSRWEQGDVFSCSVLHEALHSHYTQKSLSLSPGK

SEQ ID NO: 3139 - protein, 683 aa, synthetic construct
  source 1..683: note = XENP43452 Chain 2 - XPL1-13G7[PD-L1]_H2.18_(GKPGS)2_16G11[PD-L2]_H3.7_IgG1_PVA_ /S267K/S364K/E357Q/M428L/N434S
QVQLQESGPGLVKPSETLSLTCTVSGGSISGYFWSWIRQPPGKGLEWIGYIYYSGPTNYNPSLKSRVTISVDTSKNQFSLKLSSVTAADTAVYYCARGPLIQLWLAPFDYWGQGTLVTVSSASTKGPSVFPLAPSSKSTSGGTAALGCLVKDYFPEPVTVSWNSGALTSGVHTFPAVLQSSGLYSLSSVVTVPSSSLGTQTYICNVNHKPSNTKVDKKVEPKSCGKPGSGKPGSQVQLQESGPGLVKPSGTLSLTCAVSGGSISSSNWWGWVRQPPGKGLEWIGEIFHIGLTNYNPSLKSRVTISVDKSKNQFSLKLSSVTAADTAVYYCARVSFGDSYYFDYWGQGTLVTVSSASTKGPSVFPLAPSSKSTSGGTAALGCLVKDYFPEPVTVSWNSGALTSGVHTFPAVLQSSGLYSLSSVVTVPSSSLGTQTYICNVNHKPSNTKVDKKVEPKSCDKTHTCPPCPAPPVAGPSVFLFPPKPKDTLMISRTPEVTCVVVDVKHEDPEVKFNWYVDGVEVHNAKTKPREEQYNSTYRVVSVLTVLHQDWLNGKEYKCKVSNKALPAPIEKTISKAKGQPREPQVYTLPPSREQMTKNQVKLTCLVKGFYPSDIAVEWESNGQPENNYKTTPPVLDSDGSFFLYSKLTVDKSRWQQGNVFSCSVLHEALHSHYTQKSLSLSPGK

SEQ ID NO: 3140 - protein, 214 aa, synthetic construct; identical to SEQ ID NO: 2686
  source 1..214: note = XENP43452 Chain 3 - 6B1_L1

SEQ ID NO: 3141 - protein, 449 aa, synthetic construct; identical to SEQ ID NO: 3138
  source 1..449: note = XENP43453 Chain 1 - 1A3.88474[CD28]_H1_IgG1_pI(-)_Isosteric_A_PVA_/S267K/L368D/ K370S/M428L/N434S

SEQ ID NO: 3142 - protein, 683 aa, synthetic construct
  source 1..683: note = XENP43453 Chain 2 - XPL2-16G11[PD-L2]_H3.7_Fab_(GKPGS)2_XPL1-13G7[PD-L1]_H2.18_ Fab_IgG1_PVA_/S267K/S364K/E357Q/M428L/N434S
QVQLQESGPGLVKPSGTLSLTCAVSGGSISSSNWWGWVRQPPGKGLEWIGEIFHIGLTNYNPSLKSRVTISVDKSKNQFSLKLSSVTAADTAVYYCARVSFGDSYYFDYWGQGTLVTVSSASTKGPSVFPLAPSSKSTSGGTAALGCLVKDYFPEPVTVSWNSGALTSGVHTFPAVLQSSGLYSLSSVVTVPSSSLGTQTYICNVNHKPSNTKVDKKVEPKSCGKPGSGKPGSQVQLQESGPGLVKPSETLSLTCTVSGGSISGYFWSWIRQPPGKGLEWIGYIYYSGPTNYNPSLKSRVTISVDTSKNQFSLKLSSVTAADTAVYYCARGPLIQLWLAPFDYWGQGTLVTVSSASTKGPSVFPLAPSSKSTSGGTAALGCLVKDYFPEPVTVSWNSGALTSGVHTFPAVLQSSGLYSLSSVVTVPSSSLGTQTYICNVNHKPSNTKVDKKVEPKSCDKTHTCPPCPAPPVAGPSVFLFPPKPKDTLMISRTPEVTCVVVDVKHEDPEVKFNWYVDGVEVHNAKTKPREEQYNSTYRVVSVLTVLHQDWLNGKEYKCKVSNKALPAPIEKTISKAKGQPREPQVYTLPPSREQMTKNQVKLTCLVKGFYPSDIAVEWESNGQPENNYKTTPPVLDSDGSFFLYSKLTVDKSRWQQGNVFSCSVLHEALHSHYTQKSLSLSPGK

SEQ ID NO: 3143 - protein, 214 aa, synthetic construct; identical to SEQ ID NO: 2686
  source 1..214: note = XENP43453 Chain 3 - 6B1_L1

SEQ ID NO: 3144 - protein, 449 aa, synthetic construct; identical to SEQ ID NO: 3138
  source 1..449: note = XENP43454 Chain 1 - 1A3.88474[CD28]_H1_IgG1_pI(-)_Isosteric_A_PVA_/S267K/L368D/ K370S/M428L/N434S

SEQ ID NO: 3145 - protein, 688 aa, synthetic construct
  source 1..688: note = XENP43454 Chain 2 - XPL2-XPL2-8G2[PD-L2]_H2_(GKPGS)2_XPL1-13G7[PD-L1]_H2.18_IgG 1_PVA_/S267K/S364K/E357Q/M428L/N434S
QVQLVQSGAEVKKPGSSVKVSCKASGVNFRNYAISWVRQAPGQGLEWMGRIIPVVGKAHYEQKFQGRVTITADKSTTTAYMELSSLRSEDTAVYYCARDGPGIGVAGRGYYFDYWGQGTLVTVSSASTKGPSVFPLAPSSKSTSGGTAALGCLVKDYFPEPVTVSWNSGALTSGVHTFPAVLQSSGLYSLSSVVTVPSSSLGTQTYICNVNHKPSNTKVDKKVEPKSCGKPGSGKPGSQVQLQESGPGLVKPSETLSLTCTVSGGSISGYFWSWIRQPPGKGLEWIGYIYYSGPTNYNPSLKSRVTISVDTSKNQFSLKLSSVTAADTAVYYCARGPLIQLWLAPFDYWGQGTLVTVSSASTKGPSVFPLAPSSKSTSGGTAALGCLVKDYFPEPVTVSWNSGALTSGVHTFPAVLQSSGLYSLSSVVTVPSSSLGTQTYICNVNHKPSNTKVDKKVEPKSCDKTHTCPPCPAPPVAGPSVFLFPPKPKDTLMISRTPEVTCVVVDVKHEDPEVKFNWYVDGVEVHNAKTKPREEQYNSTYRVVSVLTVLHQDWLNGKEYKCKVSNKALPAPIEKTISKAKGQPREPQVYTLPPSREQMTKNQVKLTCLVKGFYPSDIAVEWESNGQPENNYKTTPPVLDSDGSFFLYSKLTVDKSRWQQGNVFSCSVLHEALHSHYTQKSLSLSPGK

SEQ ID NO: 3146 - protein, 214 aa, synthetic construct; identical to SEQ ID NO: 2686
  source 1..214: note = XENP43454 Chain 3 - 6B1_L1

SEQ ID NO: 3147 - protein, 450 aa, synthetic construct
  source 1..450: note = XENP44281 Chain 1 - 1A7[CD28]_H1.106_IgG1_pI(-)_Isosteric_A_PVA_/S267K/L368D/K3 70S/M428L/N434S
EVQLLESGGGLVQPGGSLRLSCAASGFTFSSYYMSWVRQAPGKGLEWVSTISERGDSTYYADSVKGRFTISRDNSKNTLYLQMNSLRAEDTAVYYCAKSGPGLRQVGFDYWGQGTLVTVSSASTKGPSVFPLAPSSKSTSGGTAALGCLVKDYFPEPVTVSWNSGALTSGVHTFPAVLQSSGLYSLSSVVTVPSSSLGTQTYICNVNHKPSDTKVDKKVEPKSCDKTHTCPPCPAPPVAGPSVFLFPPKPKDTLMISRTPEVTCVVVDVKHEDPEVKFNWYVDGVEVHNAKTKPREEEYNSTYRVVSVLTVLHQDWLNGKEYKCKVSNKALPAPIEKTISKAKGQPREPQVYTLPPSREEMTKNQVSLTCDVSGFYPSDIAVEWESDGQPENNYKTTPPVLDSDGSFFLYSKLTVDKSRWEQGDVFSCSVLHEALHSHYTQKSLSLSPGK

SEQ ID NO: 3148 - protein, 684 aa, synthetic construct
  source 1..684: note = XENP44281 Chain 2 - 1F12A4.249[PD-L2]_H1.1_(GKPGS)2_2A3A4.248[PD-L1]_H1.9_IgG1_ PVA_/S267K/S364K/E357Q/M428L/N434S
QVQLVQSGAEVKKPGSSVKVSCKASGGTFSNSVMSWVRQAPGQGLEWMGGIIPIFLAVNYAPKFQGRVTITADESTSTAYMELSSLRSEDTAVYYCAREVSRPGTEFDYWGQGTLVTVSSASTKGPSVFPLAPSSKSTSGGTAALGCLVKDYFPEPVTVSWNSGALTSGVHTFPAVLQSSGLYSLSSVVTVPSSSLGTQTYICNVNHKPSNTKVDKKVEPKSCGKPGSGKPGSQVQLVQSGAEVKKPGSSVKVSCKASGGTFSRYAISWVRQAPGQGLEWMGGIVPAFGYPAYAQKFQGRVTITADESTSTAYMELSSLRSEDTAVYYCARDDWAGPYEWTFDYWGQGTLVTVSSASTKGPSVFPLAPSSKSTSGGTAALGCLVKDYFPEPVTVSWNSGALTSGVHTFPAVLQSSGLYSLSSVVTVPSSSLGTQTYICNVNHKPSNTKVDKKVEPKSCDKTHTCPPCPAPPVAGPSVFLFPPKPKDTLMISRTPEVTCVVVDVKHEDPEVKFNWYVDGVEVHNAKTKPREEQYNSTYRVVSVLTVLHQDWLNGKEYKCKVSNKALPAPIEKTISKAKGQPREPQVYTLPPSREQMTKNQVKLTCLVKGFYPSDIAVEWESNGQPENNYKTTPPVLDSDGSFFLYSKLTVDKSRWQQGNVFSCSVLHEALHSHYTQKSLSLSPGK

SEQ ID NO: 3149 - protein, 214 aa, synthetic construct; identical to SEQ ID NO: 2936
  source 1..214: note = XENP44281 Chain 3 - IGKV1-39_L1

SEQ ID NO: 3150 - protein, 450 aa, synthetic construct
  source 1..450: note = XENP44282 Chain 1 - 1A7[CD28]_H1.107_IgG1_pI(-)_Isosteric_A_PVA_/S267K/L368D/K3 70S/M428L/N434S
EVQLLESGGGLVQPGGSLRLSCAASGFTFSSYYMSWVRQAPGKGLEWVSTISESSDVTYYADSVKGRFTISRDNSKNTLYLQMNSLRAEDTAVYYCAKSGPGLRQVGFDYWGQGTLVTVSSASTKGPSVFPLAPSSKSTSGGTAALGCLVKDYFPEPVTVSWNSGALTSGVHTFPAVLQSSGLYSLSSVVTVPSSSLGTQTYICNVNHKPSDTKVDKKVEPKSCDKTHTCPPCPAPPVAGPSVFLFPPKPKDTLMISRTPEVTCVVVDVKHEDPEVKFNWYVDGVEVHNAKTKPREEEYNSTYRVVSVLTVLHQDWLNGKEYKCKVSNKALPAPIEKTISKAKGQPREPQVYTLPPSREEMTKNQVSLTCDVSGFYPSDIAVEWESDGQPENNYKTTPPVLDSDGSFFLYSKLTVDKSRWEQGDVFSCSVLHEALHSHYTQKSLSLSPGK

SEQ ID NO: 3151 - protein, 684 aa, synthetic construct; identical to SEQ ID NO: 3148
  source 1..684: note = XENP44282 Chain 2 - 1F12A4.249[PD-L2]_H1.1_(GKPGS)2_2A3A4.248[PD-L1]_H1.9_IgG1_ PVA_/S267K/S364K/E357Q/M428L/N434S

SEQ ID NO: 3152 - protein, 214 aa, synthetic construct; identical to SEQ ID NO: 2936
  source 1..214: note = XENP44282 Chain 3 - IGKV1-39_L1

SEQ ID NO: 3153 - protein, 454 aa, synthetic construct
  source 1..454: note = XENC001 Chain 1 -13G1[PDL1]_H1_Fab-IgG1_pI(-)_Isosteric_A_PVA_/S267K/L368D/ K370S/M428L/N434S
QVQLVESGGGLVKPGGSLRLSCAASGFTFSDYYMSWIRQAPGKGLEWVSYISSSSSYTNYADSVKGRFTISRDNAKNSLYLQMNSLRAEDTAVYYCASHFVILPGAIRPEYFQHWGQGTLVTVSSASTKGPSVFPLAPSSKSTSGGTAALGCLVKDYFPEPVTVSWNSGALTSGVHTFPAVLQSSGLYSLSSVVTVPSSSLGTQTYICNVNHKPSDTKVDKKVEPKSCDKTHTCPPCPAPPVAGPSVFLFPPKPKDTLMISRTPEVTCVVVDVKHEDPEVKFNWYVDGVEVHNAKTKPREEEYNSTYRVVSVLTVLHQDWLNGKEYKCKVSNKALPAPIEKTISKAKGQPREPQVYTLPPSREEMTKNQVSLTCDVSGFYPSDIAVEWESDGQPENNYKTTPPVLDSDGSFFLYSKLTVDKSRWEQGDVFSCSVLHEALHSHYTQKSLSLSPGK

SEQ ID NO: 3154 - protein, 687 aa, synthetic construct; identical to SEQ ID NO: 3130
  source 1..687: note = XENC001 Chain 2 -1A3.88474[CD28]_H1_(GKPGS)2_8G2[PDL2]_H2_Fab-IgG1_PVA_/S26 7K/S364K/E357Q/M428L/N434S

SEQ ID NO: 3155 - protein, 214 aa, synthetic construct; identical to SEQ ID NO: 2686
  source 1..214: note = XENC001 Chain 3 -6B1_L1

SEQ ID NO: 3156 - protein, 454 aa, synthetic construct; identical to SEQ ID NO: 3153
  source 1..454: note = XENC002 Chain 1 -13G1[PDL1]_H1_Fab-IgG1_pI(-)_Isosteric_A_PVA_/S267K/L368D/ K370S/M428L/N434S

SEQ ID NO: 3157 - protein, 687 aa, synthetic construct; identical to SEQ ID NO: 3124
  source 1..687: note = XENC002 Chain 2 -8G2[PDL2]_H2_(GKPGS)2_1A3.88474[CD28]_H1_Fab-IgG1_PVA_/S26 7K/S364K/E357Q/M428L/N434S

SEQ ID NO: 3158 - protein, 214 aa, synthetic construct; identical to SEQ ID NO: 2686
  source 1..214: note = XENC002 Chain 3 -6B1_L1

SEQ ID NO: 3159 - protein, 454 aa, synthetic construct
  source 1..454: note = XENC003 Chain 1 -8G2[PDL2]_H2_Fab-IgG1_pI(-)_Isosteric_A_PVA_/S267K/L368D/K 370S/M428L/N434S
QVQLVQSGAEVKKPGSSVKVSCKASGVNFRNYAISWVRQAPGQGLEWMGRIIPVVGKAHYEQKFQGRVTITADKSTTTAYMELSSLRSEDTAVYYCARDGPGIGVAGRGYYFDYWGQGTLVTVSSASTKGPSVFPLAPSSKSTSGGTAALGCLVKDYFPEPVTVSWNSGALTSGVHTFPAVLQSSGLYSLSSVVTVPSSSLGTQTYICNVNHKPSDTKVDKKVEPKSCDKTHTCPPCPAPPVAGPSVFLFPPKPKDTLMISRTPEVTCVVVDVKHEDPEVKFNWYVDGVEVHNAKTKPREEEYNSTYRVVSVLTVLHQDWLNGKEYKCKVSNKALPAPIEKTISKAKGQPREPQVYTLPPSREEMTKNQVSLTCDVSGFYPSDIAVEWESDGQPENNYKTTPPVLDSDGSFFLYSKLTVDKSRWEQGDVFSCSVLHEALHSHYTQKSLSLSPGK

SEQ ID NO: 3160 - protein, 687 aa, synthetic construct
  source 1..687: note = XENC003 Chain 2 -1A3.88474[CD28]_H1_(GKPGS)2_13G1[PDL1]_H1_Fab-IgG1_PVA_/S2 67K/S364K/E357Q/M428L/N434S
EVQLVESGGGLVQPGGSLRLSCAAFGFTFSNYWMHWVRQAPGKGLVWVSRINSDGSSASFADSVRGRFTISRDNAKNTLYLQLNSLRAEDTAVYYCARADSSSWYLFDNWGQGTLVTVSSASTKGPSVFPLAPSSKSTSGGTAALGCLVKDYFPEPVTVSWNSGALTSGVHTFPAVLQSSGLYSLSSVVTVPSSSLGTQTYICNVNHKPSNTKVDKKVEPKSCGKPGSGKPGSQVQLVESGGGLVKPGGSLRLSCAASGFTFSDYYMSWIRQAPGKGLEWVSYISSSSSYTNYADSVKGRFTISRDNAKNSLYLQMNSLRAEDTAVYYCASHFVILPGAIRPEYFQHWGQGTLVTVSSASTKGPSVFPLAPSSKSTSGGTAALGCLVKDYFPEPVTVSWNSGALTSGVHTFPAVLQSSGLYSLSSVVTVPSSSLGTQTYICNVNHKPSNTKVDKKVEPKSCDKTHTCPPCPAPPVAGPSVFLFPPKPKDTLMISRTPEVTCVVVDVKHEDPEVKFNWYVDGVEVHNAKTKPREEQYNSTYRVVSVLTVLHQDWLNGKEYKCKVSNKALPAPIEKTISKAKGQPREPQVYTLPPSREQMTKNQVKLTCLVKGFYPSDIAVEWESNGQPENNYKTTPPVLDSDGSFFLYSKLTVDKSRWQQGNVFSCSVLHEALHSHYTQKSLSLSPGK

SEQ ID NO: 3161 - protein, 214 aa, synthetic construct; identical to SEQ ID NO: 2686
  source 1..214: note = XENC003 Chain 3 -6B1_L1

SEQ ID NO: 3162 - protein, 454 aa, synthetic construct; identical to SEQ ID NO: 3159
  source 1..454: note = XENC004 Chain 1 -8G2[PDL2]_H2_Fab-IgG1_pI(-)_Isosteric_A_PVA_/S267K/L368D/K 370S/M428L/N434S

SEQ ID NO: 3163 - protein, 687 aa, synthetic construct
  source 1..687: note = XENC004 Chain 2 -13G1[PDL1]_H1_(GKPGS)2_1A3.88474[CD28]_H1_Fab-IgG1_PVA_/S2 67K/S364K/E357Q/M428L/N434S
QVQLVESGGGLVKPGGSLRLSCAASGFTFSDYYMSWIRQAPGKGLEWVSYISSSSSYTNYADSVKGRFTISRDNAKNSLYLQMNSLRAEDTAVYYCASHFVILPGAIRPEYFQHWGQGTLVTVSSASTKGPSVFPLAPSSKSTSGGTAALGCLVKDYFPEPVTVSWNSGALTSGVHTFPAVLQSSGLYSLSSVVTVPSSSLGTQTYICNVNHKPSNTKVDKKVEPKSCGKPGSGKPGSEVQLVESGGGLVQPGGSLRLSCAAFGFTFSNYWMHWVRQAPGKGLVWVSRINSDGSSASFADSVRGRFTISRDNAKNTLYLQLNSLRAEDTAVYYCARADSSSWYLFDNWGQGTLVTVSSASTKGPSVFPLAPSSKSTSGGTAALGCLVKDYFPEPVTVSWNSGALTSGVHTFPAVLQSSGLYSLSSVVTVPSSSLGTQTYICNVNHKPSNTKVDKKVEPKSCDKTHTCPPCPAPPVAGPSVFLFPPKPKDTLMISRTPEVTCVVVDVKHEDPEVKFNWYVDGVEVHNAKTKPREEQYNSTYRVVSVLTVLHQDWLNGKEYKCKVSNKALPAPIEKTISKAKGQPREPQVYTLPPSREQMTKNQVKLTCLVKGFYPSDIAVEWESNGQPENNYKTTPPVLDSDGSFFLYSKLTVDKSRWQQGNVFSCSVLHEALHSHYTQKSLSLSPGK

SEQ ID NO: 3164 - protein, 214 aa, synthetic construct; identical to SEQ ID NO: 2686
  source 1..214: note = XENC004 Chain 3 -6B1_L1

SEQ ID NO: 3165 - protein, 449 aa, synthetic construct; identical to SEQ ID NO: 3138
  source 1..449: note = XENC005 Chain 1 -1A3.88474[CD28]_H1_Fab-IgG1_pI(-)_Isosteric_A_PVA_/S267K/L 368D/K370S/M428L/N434S

SEQ ID NO: 3166 - protein, 692 aa, synthetic construct
  source 1..692: note = XENC005 Chain 2 -13G1[PDL1]_H1_(GKPGS)2_8G2[PDL2]_H2_Fab-IgG1_PVA_/S267K/S3 64K/E357Q/M428L/N434S
QVQLVESGGGLVKPGGSLRLSCAASGFTFSDYYMSWIRQAPGKGLEWVSYISSSSSYTNYADSVKGRFTISRDNAKNSLYLQMNSLRAEDTAVYYCASHFVILPGAIRPEYFQHWGQGTLVTVSSASTKGPSVFPLAPSSKSTSGGTAALGCLVKDYFPEPVTVSWNSGALTSGVHTFPAVLQSSGLYSLSSVVTVPSSSLGTQTYICNVNHKPSNTKVDKKVEPKSCGKPGSGKPGSQVQLVQSGAEVKKPGSSVKVSCKASGVNFRNYAISWVRQAPGQGLEWMGRIIPVVGKAHYEQKFQGRVTITADKSTTTAYMELSSLRSEDTAVYYCARDGPGIGVAGRGYYFDYWGQGTLVTVSSASTKGPSVFPLAPSSKSTSGGTAALGCLVKDYFPEPVTVSWNSGALTSGVHTFPAVLQSSGLYSLSSVVTVPSSSLGTQTYICNVNHKPSNTKVDKKVEPKSCDKTHTCPPCPAPPVAGPSVFLFPPKPKDTLMISRTPEVTCVVVDVKHEDPEVKFNWYVDGVEVHNAKTKPREEQYNSTYRVVSVLTVLHQDWLNGKEYKCKVSNKALPAPIEKTISKAKGQPREPQVYTLPPSREQMTKNQVKLTCLVKGFYPSDIAVEWESNGQPENNYKTTPPVLDSDGSFFLYSKLTVDKSRWQQGNVFSCSVLHEALHSHYTQKSLSLSPGK

SEQ ID NO: 3167 - protein, 214 aa, synthetic construct; identical to SEQ ID NO: 2686
  source 1..214: note = XENC005 Chain 3 -6B1_L1

SEQ ID NO: 3168 - protein, 449 aa, synthetic construct; identical to SEQ ID NO: 3138
  source 1..449: note = XENC006 Chain 1 -1A3.88474[CD28]_H1_Fab-IgG1_pI(-)_Isosteric_A_PVA_/S267K/L 368D/K370S/M428L/N434S

SEQ ID NO: 3169 - protein, 692 aa, synthetic construct
  source 1..692: note = XENC006 Chain 2 -8G2[PDL2]_H2_(GKPGS)2_13G1[PDL1]_H1_Fab-IgG1_PVA_/S267K/S3 64K/E357Q/M428L/N434S
QVQLVQSGAEVKKPGSSVKVSCKASGVNFRNYAISWVRQAPGQGLEWMGRIIPVVGKAHYEQKFQGRVTITADKSTTTAYMELSSLRSEDTAVYYCARDGPGIGVAGRGYYFDYWGQGTLVTVSSASTKGPSVFPLAPSSKSTSGGTAALGCLVKDYFPEPVTVSWNSGALTSGVHTFPAVLQSSGLYSLSSVVTVPSSSLGTQTYICNVNHKPSNTKVDKKVEPKSCGKPGSGKPGSQVQLVESGGGLVKPGGSLRLSCAASGFTFSDYYMSWIRQAPGKGLEWVSYISSSSSYTNYADSVKGRFTISRDNAKNSLYLQMNSLRAEDTAVYYCASHFVILPGAIRPEYFQHWGQGTLVTVSSASTKGPSVFPLAPSSKSTSGGTAALGCLVKDYFPEPVTVSWNSGALTSGVHTFPAVLQSSGLYSLSSVVTVPSSSLGTQTYICNVNHKPSNTKVDKKVEPKSCDKTHTCPPCPAPPVAGPSVFLFPPKPKDTLMISRTPEVTCVVVDVKHEDPEVKFNWYVDGVEVHNAKTKPREEQYNSTYRVVSVLTVLHQDWLNGKEYKCKVSNKALPAPIEKTISKAKGQPREPQVYTLPPSREQMTKNQVKLTCLVKGFYPSDIAVEWESNGQPENNYKTTPPVLDSDGSFFLYSKLTVDKSRWQQGNVFSCSVLHEALHSHYTQKSLSLSPGK

SEQ ID NO: 3170 - protein, 214 aa, synthetic construct; identical to SEQ ID NO: 2686
  source 1..214: note = XENC006 Chain 3 -6B1_L1

SEQ ID NO: 3171 - protein, 450 aa, synthetic construct
  source 1..450: note = XENP44283 Chain 1 - 1A7[CD28]_H1.111_IgG1_pI(-)_Isosteric_A_PVA_/S267K/L368D/K3 70S/M428L/N434S
EVQLLESGGGLVQPGGSLRLSCAASGFTFSSYYMSWVRQAPGKGLEWVSTISERSDSTYYADSVKGRFTISRDNSKNTLYLQMNSLRAEDTAVYYCAKSGPGLRQVGFDYWGQGTLVTVSSASTKGPSVFPLAPSSKSTSGGTAALGCLVKDYFPEPVTVSWNSGALTSGVHTFPAVLQSSGLYSLSSVVTVPSSSLGTQTYICNVNHKPSDTKVDKKVEPKSCDKTHTCPPCPAPPVAGPSVFLFPPKPKDTLMISRTPEVTCVVVDVKHEDPEVKFNWYVDGVEVHNAKTKPREEEYNSTYRVVSVLTVLHQDWLNGKEYKCKVSNKALPAPIEKTISKAKGQPREPQVYTLPPSREEMTKNQVSLTCDVSGFYPSDIAVEWESDGQPENNYKTTPPVLDSDGSFFLYSKLTVDKSRWEQGDVFSCSVLHEALHSHYTQKSLSLSPGK

SEQ ID NO: 3172 - protein, 684 aa, synthetic construct; identical to SEQ ID NO: 3148
  source 1..684: note = XENP44283 Chain 2 - 1F12A4.249[PD-L2]_H1.1_(GKPGS)2_2A3A4.248[PD-L1]_H1.9_IgG1_ PVA_/S267K/S364K/E357Q/M428L/N434S

SEQ ID NO: 3173 - protein, 214 aa, synthetic construct; identical to SEQ ID NO: 2936
  source 1..214: note = XENP44283 Chain 3 - IGKV1-39_L1 Light Chain

SEQ ID NO: 3174 - protein, 450 aa, synthetic construct
  source 1..450: note = XENP44284 Chain 1 - 1A7[CD28]_H1.113_IgG1_pI(-)_Isosteric_A_PVA_/S267K/L368D/K3 70S/M428L/N434S
EVQLLESGGGLVQPGGSLRLSCAASGFTFSSYYMSWVRQAPGKGLEWVSTISERTDSTYYADSVKGRFTISRDNSKNTLYLQMNSLRAEDTAVYYCAKSGPGLRQVGFDYWGQGTLVTVSSASTKGPSVFPLAPSSKSTSGGTAALGCLVKDYFPEPVTVSWNSGALTSGVHTFPAVLQSSGLYSLSSVVTVPSSSLGTQTYICNVNHKPSDTKVDKKVEPKSCDKTHTCPPCPAPPVAGPSVFLFPPKPKDTLMISRTPEVTCVVVDVKHEDPEVKFNWYVDGVEVHNAKTKPREEEYNSTYRVVSVLTVLHQDWLNGKEYKCKVSNKALPAPIEKTISKAKGQPREPQVYTLPPSREEMTKNQVSLTCDVSGFYPSDIAVEWESDGQPENNYKTTPPVLDSDGSFFLYSKLTVDKSRWEQGDVFSCSVLHEALHSHYTQKSLSLSPGK

SEQ ID NO: 3175 - protein, 684 aa, synthetic construct; identical to SEQ ID NO: 3148
  source 1..684: note = XENP44284 Chain 2 - 1F12A4.249[PD-L2]_H1.1_(GKPGS)2_2A3A4.248[PD-L1]_H1.9_IgG1_ PVA_/S267K/S364K/E357Q/M428L/N434S

SEQ ID NO: 3176 - protein, 214 aa, synthetic construct; identical to SEQ ID NO: 2936
  source 1..214: note = XENP44284 Chain 3 - IGKV1-39_L1

SEQ ID NO: 3177 - protein, 450 aa, synthetic construct
  source 1..450: note = XENP44285 Chain 1 - 1A7[CD28]_H1.114_IgG1_pI(-)_Isosteric_A_PVA_/S267K/L368D/K3 70S/M428L/N434S
EVQLLESGGGLVQPGGSLRLSCAASGFTFSSYYMSWVRQAPGKGLEWVSTIAERGDSTYYADSVKGRFTISRDNSKNTLYLQMNSLRAEDTAVYYCAKSGPGLRQVGFDYWGQGTLVTVSSASTKGPSVFPLAPSSKSTSGGTAALGCLVKDYFPEPVTVSWNSGALTSGVHTFPAVLQSSGLYSLSSVVTVPSSSLGTQTYICNVNHKPSDTKVDKKVEPKSCDKTHTCPPCPAPPVAGPSVFLFPPKPKDTLMISRTPEVTCVVVDVKHEDPEVKFNWYVDGVEVHNAKTKPREEEYNSTYRVVSVLTVLHQDWLNGKEYKCKVSNKALPAPIEKTISKAKGQPREPQVYTLPPSREEMTKNQVSLTCDVSGFYPSDIAVEWESDGQPENNYKTTPPVLDSDGSFFLYSKLTVDKSRWEQGDVFSCSVLHEALHSHYTQKSLSLSPGK

SEQ ID NO: 3178 - protein, 684 aa, synthetic construct; identical to SEQ ID NO: 3148
  source 1..684: note = XENP44285 Chain 2 - 1F12A4.249[PD-L2]_H1.1_(GKPGS)2_2A3A4.248[PD-L1]_H1.9_IgG1_ PVA_/S267K/S364K/E357Q/M428L/N434S

SEQ ID NO: 3179 - protein, 214 aa, synthetic construct; identical to SEQ ID NO: 2936
  source 1..214: note = XENP44285 Chain 3 - IGKV1-39_L1

SEQ ID NO: 3180 - protein, 450 aa, synthetic construct
  source 1..450: note = XENP44286 Chain 1 - 1A7[CD28]_H1.118_IgG1_pI(-)_Isosteric_A_PVA_/S267K/L368D/K3 70S/M428L/N434S
EVQLLESGGGLVQPGGSLRLSCAASGFTFSSYYMSWVRQAPGKGLEWVSTIAESGDPTYYADSVKGRFTISRDNSKNTLYLQMNSLRAEDTAVYYCAKSGPGLRQVGFDYWGQGTLVTVSSASTKGPSVFPLAPSSKSTSGGTAALGCLVKDYFPEPVTVSWNSGALTSGVHTFPAVLQSSGLYSLSSVVTVPSSSLGTQTYICNVNHKPSDTKVDKKVEPKSCDKTHTCPPCPAPPVAGPSVFLFPPKPKDTLMISRTPEVTCVVVDVKHEDPEVKFNWYVDGVEVHNAKTKPREEEYNSTYRVVSVLTVLHQDWLNGKEYKCKVSNKALPAPIEKTISKAKGQPREPQVYTLPPSREEMTKNQVSLTCDVSGFYPSDIAVEWESDGQPENNYKTTPPVLDSDGSFFLYSKLTVDKSRWEQGDVFSCSVLHEALHSHYTQKSLSLSPGK

SEQ ID NO: 3181 - protein, 684 aa, synthetic construct; identical to SEQ ID NO: 3148
  source 1..684: note = XENP44286 Chain 2 - 1F12A4.249[PD-L2]_H1.1_(GKPGS)2_2A3A4.248[PD-L1]_H1.9_IgG1_ PVA_/S267K/S364K/E357Q/M428L/N434S

SEQ ID NO: 3182 - protein, 214 aa, synthetic construct; identical to SEQ ID NO: 2936
  source 1..214: note = XENP44286 Chain 3 - IGKV1-39_L1

SEQ ID NO: 3183 - protein, 450 aa, synthetic construct
  source 1..450: note = XENP44287 Chain 1 - 1A7[CD28]_H1.125_IgG1_pI(-)_Isosteric_A_PVA_/S267K/L368D/K3 70S/M428L/N434S
EVQLLESGGGLVQPGGSLRLSCAASGFTFSSYYMSWVRQAPGKGLEWVSTISEHGLSTYYADSVKGRFTISRDNSKNTLYLQMNSLRAEDTAVYYCAKSGPGLRQVGFDYWGQGTLVTVSSASTKGPSVFPLAPSSKSTSGGTAALGCLVKDYFPEPVTVSWNSGALTSGVHTFPAVLQSSGLYSLSSVVTVPSSSLGTQTYICNVNHKPSDTKVDKKVEPKSCDKTHTCPPCPAPPVAGPSVFLFPPKPKDTLMISRTPEVTCVVVDVKHEDPEVKFNWYVDGVEVHNAKTKPREEEYNSTYRVVSVLTVLHQDWLNGKEYKCKVSNKALPAPIEKTISKAKGQPREPQVYTLPPSREEMTKNQVSLTCDVSGFYPSDIAVEWESDGQPENNYKTTPPVLDSDGSFFLYSKLTVDKSRWEQGDVFSCSVLHEALHSHYTQKSLSLSPGK

SEQ ID NO: 3184 - protein, 684 aa, synthetic construct; identical to SEQ ID NO: 3148
  source 1..684: note = XENP44287 Chain 2 - 1F12A4.249[PD-L2]_H1.1_(GKPGS)2_2A3A4.248[PD-L1]_H1.9_IgG1_ PVA_/S267K/S364K/E357Q/M428L/N434S

SEQ ID NO: 3185 - protein, 214 aa, synthetic construct; identical to SEQ ID NO: 2936
  source 1..214: note = XENP44287 Chain 3 - IGKV1-39_L1

SEQ ID NO: 3186 - protein, 450 aa, synthetic construct
  source 1..450: note = XENP44288 Chain 1 - 1A7[CD28]_H1.129_IgG1_pI(-)_Isosteric_A_PVA_/S267K/L368D/K3 70S/M428L/N434S
EVQLLESGGGLVQPGGSLRLSCAASGFTFSSYYMSWVRQAPGKGLEWVSTISERADSTYYADSVKGRFTISRDNSKNTLYLQMNSLRAEDTAVYYCAKSGPGLRQVGFDYWGQGTLVTVSSASTKGPSVFPLAPSSKSTSGGTAALGCLVKDYFPEPVTVSWNSGALTSGVHTFPAVLQSSGLYSLSSVVTVPSSSLGTQTYICNVNHKPSDTKVDKKVEPKSCDKTHTCPPCPAPPVAGPSVFLFPPKPKDTLMISRTPEVTCVVVDVKHEDPEVKFNWYVDGVEVHNAKTKPREEEYNSTYRVVSVLTVLHQDWLNGKEYKCKVSNKALPAPIEKTISKAKGQPREPQVYTLPPSREEMTKNQVSLTCDVSGFYPSDIAVEWESDGQPENNYKTTPPVLDSDGSFFLYSKLTVDKSRWEQGDVFSCSVLHEALHSHYTQKSLSLSPGK

SEQ ID NO: 3187 - protein, 684 aa, synthetic construct; identical to SEQ ID NO: 3148
  source 1..684: note = XENP44288 Chain 2 - 1F12A4.249[PD-L2]_H1.1_(GKPGS)2_2A3A4.248[PD-L1]_H1.9_IgG1_ PVA_/S267K/S364K/E357Q/M428L/N434S

SEQ ID NO: 3188 - protein, 214 aa, synthetic construct; identical to SEQ ID NO: 2936
  source 1..214: note = XENP44288 Chain 3 - IGKV1-39_L1 Light Chain

SEQ ID NO: 3189 - protein, 450 aa, synthetic construct
  source 1..450: note = XENP44289 Chain 1 - 1A7[CD28]_H1.130_IgG1_pI(-)_Isosteric_A_PVA_/S267K/L368D/K3 70S/M428L/N434S
EVQLLESGGGLVQPGGSLRLSCAASGFTFSSYYMSWVRQAPGKGLEWVSTISERGDVTYYADSVKGRFTISRDNSKNTLYLQMNSLRAEDTAVYYCAKSGPGLRQVGFDYWGQGTLVTVSSASTKGPSVFPLAPSSKSTSGGTAALGCLVKDYFPEPVTVSWNSGALTSGVHTFPAVLQSSGLYSLSSVVTVPSSSLGTQTYICNVNHKPSDTKVDKKVEPKSCDKTHTCPPCPAPPVAGPSVFLFPPKPKDTLMISRTPEVTCVVVDVKHEDPEVKFNWYVDGVEVHNAKTKPREEEYNSTYRVVSVLTVLHQDWLNGKEYKCKVSNKALPAPIEKTISKAKGQPREPQVYTLPPSREEMTKNQVSLTCDVSGFYPSDIAVEWESDGQPENNYKTTPPVLDSDGSFFLYSKLTVDKSRWEQGDVFSCSVLHEALHSHYTQKSLSLSPGK

SEQ ID NO: 3190 - protein, 684 aa, synthetic construct; identical to SEQ ID NO: 3148
  source 1..684: note = XENP44289 Chain 2 - 1F12A4.249[PD-L2]_H1.1_(GKPGS)2_2A3A4.248[PD-L1]_H1.9_IgG1_ PVA_/S267K/S364K/E357Q/M428L/N434S

SEQ ID NO: 3191 - protein, 214 aa, synthetic construct; identical to SEQ ID NO: 2936
  source 1..214: note = XENP44289 Chain 3 - IGKV1-39_L1

SEQ ID NO: 3192 - protein, 450 aa, synthetic construct; identical to SEQ ID NO: 3186
  source 1..450: note = XENP44673 Chain 1 - 1A7[CD28]_H1.129_IgG1_pI(-)_Isosteric_A_PVA_/S267K/L368D/K3 70S/M428L/N434S

SEQ ID NO: 3193 - protein, 684 aa, synthetic construct
  source 1..684: note = XENP44673 Chain 2 - 1F12A4.249[PD-L2]_H1.30_(GKPGS)2_2A3A4.248[PD-L1]_H1.9_IgG1 _PVA_/S267K/S364K/E357Q/M428L/N434S
QVQLVQSGAEVKKPGSSVKVSCKASGGTFSLSVMSWVRQAPGQGLEWMGGIIPIFLAVNYAPKFQGRVTITADESTSTAYMELSSLRSEDTAVYYCAREVSRPGTEFDYWGQGTLVTVSSASTKGPSVFPLAPSSKSTSGGTAALGCLVKDYFPEPVTVSWNSGALTSGVHTFPAVLQSSGLYSLSSVVTVPSSSLGTQTYICNVNHKPSNTKVDKKVEPKSCGKPGSGKPGSQVQLVQSGAEVKKPGSSVKVSCKASGGTFSRYAISWVRQAPGQGLEWMGGIVPAFGYPAYAQKFQGRVTITADESTSTAYMELSSLRSEDTAVYYCARDDWAGPYEWTFDYWGQGTLVTVSSASTKGPSVFPLAPSSKSTSGGTAALGCLVKDYFPEPVTVSWNSGALTSGVHTFPAVLQSSGLYSLSSVVTVPSSSLGTQTYICNVNHKPSNTKVDKKVEPKSCDKTHTCPPCPAPPVAGPSVFLFPPKPKDTLMISRTPEVTCVVVDVKHEDPEVKFNWYVDGVEVHNAKTKPREEQYNSTYRVVSVLTVLHQDWLNGKEYKCKVSNKALPAPIEKTISKAKGQPREPQVYTLPPSREQMTKNQVKLTCLVKGFYPSDIAVEWESNGQPENNYKTTPPVLDSDGSFFLYSKLTVDKSRWQQGNVFSCSVLHEALHSHYTQKSLSLSPGK

SEQ ID NO: 3194 - protein, 214 aa, synthetic construct; identical to SEQ ID NO: 2936
  source 1..214: note = XENP44673 Chain 3 - IGKV1-39_L1

SEQ ID NO: 3195 - protein, 450 aa, synthetic construct; identical to SEQ ID NO: 3186
  source 1..450: note = XENP44674 Chain 1 - 1A7[CD28]_H1.129_IgG1_pI(-)_Isosteric_A_PVA_/S267K/L368D/K3 70S/M428L/N434S

SEQ ID NO: 3196 - protein, 684 aa, synthetic construct
  source 1..684: note = XENP44674 Chain 2 - 1F12A4.249[PD-L2]_H1.31_(GKPGS)2_2A3A4.248[PD-L1]_H1.9_IgG1 _PVA_/S267K/S364K/E357Q/M428L/N434S
QVQLVQSGAEVKKPGSSVKVSCKASGGTFSKSVMSWVRQAPGQGLEWMGGIIPIFLAVNYAPKFQGRVTITADESTSTAYMELSSLRSEDTAVYYCAREVSRPGTEFDYWGQGTLVTVSSASTKGPSVFPLAPSSKSTSGGTAALGCLVKDYFPEPVTVSWNSGALTSGVHTFPAVLQSSGLYSLSSVVTVPSSSLGTQTYICNVNHKPSNTKVDKKVEPKSCGKPGSGKPGSQVQLVQSGAEVKKPGSSVKVSCKASGGTFSRYAISWVRQAPGQGLEWMGGIVPAFGYPAYAQKFQGRVTITADESTSTAYMELSSLRSEDTAVYYCARDDWAGPYEWTFDYWGQGTLVTVSSASTKGPSVFPLAPSSKSTSGGTAALGCLVKDYFPEPVTVSWNSGALTSGVHTFPAVLQSSGLYSLSSVVTVPSSSLGTQTYICNVNHKPSNTKVDKKVEPKSCDKTHTCPPCPAPPVAGPSVFLFPPKPKDTLMISRTPEVTCVVVDVKHEDPEVKFNWYVDGVEVHNAKTKPREEQYNSTYRVVSVLTVLHQDWLNGKEYKCKVSNKALPAPIEKTISKAKGQPREPQVYTLPPSREQMTKNQVKLTCLVKGFYPSDIAVEWESNGQPENNYKTTPPVLDSDGSFFLYSKLTVDKSRWQQGNVFSCSVLHEALHSHYTQKSLSLSPGK

SEQ ID NO: 3197 - protein, 214 aa, synthetic construct; identical to SEQ ID NO: 2936
  source 1..214: note = XENP44674 Chain 3 - IGKV1-39_L1

SEQ ID NO: 3198 - protein, 450 aa, synthetic construct; identical to SEQ ID NO: 3186
  source 1..450: note = XENP44675 Chain 1 - 1A7[CD28]_H1.129_IgG1_pI(-)_Isosteric_A_PVA_/S267K/L368D/K3 70S/M428L/N434S

SEQ ID NO: 3199 - protein, 684 aa, synthetic construct
  source 1..684: note = XENP44675 Chain 2 - 1F12A4.249[PD-L2]_H1.33_(GKPGS)2_2A3A4.248[PD-L1]_H1.9_IgG1 _PVA_/S267K/S364K/E357Q/M428L/N434S
QVQLVQSGAEVKKPGSSVKVSCKASGGGFSNSVMSWVRQAPGQGLEWMGGIIPIFLAVNYAPKFQGRVTITADESTSTAYMELSSLRSEDTAVYYCAREISRPGTEFDYWGQGTLVTVSSASTKGPSVFPLAPSSKSTSGGTAALGCLVKDYFPEPVTVSWNSGALTSGVHTFPAVLQSSGLYSLSSVVTVPSSSLGTQTYICNVNHKPSNTKVDKKVEPKSCGKPGSGKPGSQVQLVQSGAEVKKPGSSVKVSCKASGGTFSRYAISWVRQAPGQGLEWMGGIVPAFGYPAYAQKFQGRVTITADESTSTAYMELSSLRSEDTAVYYCARDDWAGPYEWTFDYWGQGTLVTVSSASTKGPSVFPLAPSSKSTSGGTAALGCLVKDYFPEPVTVSWNSGALTSGVHTFPAVLQSSGLYSLSSVVTVPSSSLGTQTYICNVNHKPSNTKVDKKVEPKSCDKTHTCPPCPAPPVAGPSVFLFPPKPKDTLMISRTPEVTCVVVDVKHEDPEVKFNWYVDGVEVHNAKTKPREEQYNSTYRVVSVLTVLHQDWLNGKEYKCKVSNKALPAPIEKTISKAKGQPREPQVYTLPPSREQMTKNQVKLTCLVKGFYPSDIAVEWESNGQPENNYKTTPPVLDSDGSFFLYSKLTVDKSRWQQGNVFSCSVLHEALHSHYTQKSLSLSPGK

SEQ ID NO: 3200 - protein, 214 aa, synthetic construct; identical to SEQ ID NO: 2936
  source 1..214: note = XENP44675 Chain 3 - IGKV1-39_L1

SEQ ID NO: 3201 - protein, 450 aa, synthetic construct; identical to SEQ ID NO: 3186
  source 1..450: note = XENP44676 Chain 1 - 1A7[CD28]_H1.129_IgG1_pI(-)_Isosteric_A_PVA_/S267K/L368D/K3 70S/M428L/N434S

SEQ ID NO: 3202 - protein, 684 aa, synthetic construct
  source 1..684: note = XENP44676 Chain 2 - 1F12A4.249[PD-L2]_H1.45_(GKPGS)2_2A3A4.248[PD-L1]_H1.9_IgG1 _PVA_/S267K/S364K/E357Q/M428L/N434S
QVQLVQSGAEVKKPGSSVKVSCKASGWTFSNSVMSWVRQAPGQGLEWMGGIIPIFLAVNYAPKFQGRVTITADESTSTAYMELSSLRSEDTAVYYCAREVSRPGTEFDYWGQGTLVTVSSASTKGPSVFPLAPSSKSTSGGTAALGCLVKDYFPEPVTVSWNSGALTSGVHTFPAVLQSSGLYSLSSVVTVPSSSLGTQTYICNVNHKPSNTKVDKKVEPKSCGKPGSGKPGSQVQLVQSGAEVKKPGSSVKVSCKASGGTFSRYAISWVRQAPGQGLEWMGGIVPAFGYPAYAQKFQGRVTITADESTSTAYMELSSLRSEDTAVYYCARDDWAGPYEWTFDYWGQGTLVTVSSASTKGPSVFPLAPSSKSTSGGTAALGCLVKDYFPEPVTVSWNSGALTSGVHTFPAVLQSSGLYSLSSVVTVPSSSLGTQTYICNVNHKPSNTKVDKKVEPKSCDKTHTCPPCPAPPVAGPSVFLFPPKPKDTLMISRTPEVTCVVVDVKHEDPEVKFNWYVDGVEVHNAKTKPREEQYNSTYRVVSVLTVLHQDWLNGKEYKCKVSNKALPAPIEKTISKAKGQPREPQVYTLPPSREQMTKNQVKLTCLVKGFYPSDIAVEWESNGQPENNYKTTPPVLDSDGSFFLYSKLTVDKSRWQQGNVFSCSVLHEALHSHYTQKSLSLSPGK

SEQ ID NO: 3203 - protein, 214 aa, synthetic construct; identical to SEQ ID NO: 2936
  source 1..214: note = XENP44676 Chain 3 - IGKV1-39_L1

SEQ ID NO: 3204 - protein, 450 aa, synthetic construct; identical to SEQ ID NO: 3186
  source 1..450: note = XENP44677 Chain 1 - 1A7[CD28]_H1.129_IgG1_pI(-)_Isosteric_A_PVA_/S267K/L368D/K3 70S/M428L/N434S

SEQ ID NO: 3205 - protein, 684 aa, synthetic construct
  source 1..684: note = XENP44677 Chain 2 - 1F12A4.249[PD-L2]_H1.74_(GKPGS)2_2A3A4.248[PD-L1]_H1.9_IgG1 _PVA_/S267K/S364K/E357Q/M428L/N434S
QVQLVQSGAEVKKPGSSVKVSCKASGFTFSNSVMSWVRQAPGQGLEWMGGIIPIFLAVNYAPKFQGRVTITADESTSTAYMELSSLRSEDTAVYYCAREVSRPGTEFDYWGQGTLVTVSSASTKGPSVFPLAPSSKSTSGGTAALGCLVKDYFPEPVTVSWNSGALTSGVHTFPAVLQSSGLYSLSSVVTVPSSSLGTQTYICNVNHKPSNTKVDKKVEPKSCGKPGSGKPGSQVQLVQSGAEVKKPGSSVKVSCKASGGTFSRYAISWVRQAPGQGLEWMGGIVPAFGYPAYAQKFQGRVTITADESTSTAYMELSSLRSEDTAVYYCARDDWAGPYEWTFDYWGQGTLVTVSSASTKGPSVFPLAPSSKSTSGGTAALGCLVKDYFPEPVTVSWNSGALTSGVHTFPAVLQSSGLYSLSSVVTVPSSSLGTQTYICNVNHKPSNTKVDKKVEPKSCDKTHTCPPCPAPPVAGPSVFLFPPKPKDTLMISRTPEVTCVVVDVKHEDPEVKFNWYVDGVEVHNAKTKPREEQYNSTYRVVSVLTVLHQDWLNGKEYKCKVSNKALPAPIEKTISKAKGQPREPQVYTLPPSREQMTKNQVKLTCLVKGFYPSDIAVEWESNGQPENNYKTTPPVLDSDGSFFLYSKLTVDKSRWQQGNVFSCSVLHEALHSHYTQKSLSLSPGK

SEQ ID NO: 3206 - protein, 214 aa, synthetic construct; identical to SEQ ID NO: 2936
  source 1..214: note = XENP44677 Chain 3 - IGKV1-39_L1

SEQ ID NO: 3207 - protein, 450 aa, synthetic construct; identical to SEQ ID NO: 3186
  source 1..450: note = XENP44678 Chain 1 - 1A7[CD28]_H1.129_IgG1_pI(-)_Isosteric_A_PVA_/S267K/L368D/K3 70S/M428L/N434S

SEQ ID NO: 3208 - protein, 684 aa, synthetic construct
  source 1..684: note = XENP44678 Chain 2 - 1F12A4.249[PD-L2]_H1.75_(GKPGS)2_2A3A4.248[PD-L1]_H1.9_IgG1 _PVA_/S267K/S364K/E357Q/M428L/N434S
QVQLVQSGAEVKKPGSSVKVSCKASGYTFSNSVMSWVRQAPGQGLEWMGGIIPIFLAVNYAPKFQGRVTITADESTSTAYMELSSLRSEDTAVYYCAREVSRPGTEFDYWGQGTLVTVSSASTKGPSVFPLAPSSKSTSGGTAALGCLVKDYFPEPVTVSWNSGALTSGVHTFPAVLQSSGLYSLSSVVTVPSSSLGTQTYICNVNHKPSNTKVDKKVEPKSCGKPGSGKPGSQVQLVQSGAEVKKPGSSVKVSCKASGGTFSRYAISWVRQAPGQGLEWMGGIVPAFGYPAYAQKFQGRVTITADESTSTAYMELSSLRSEDTAVYYCARDDWAGPYEWTFDYWGQGTLVTVSSASTKGPSVFPLAPSSKSTSGGTAALGCLVKDYFPEPVTVSWNSGALTSGVHTFPAVLQSSGLYSLSSVVTVPSSSLGTQTYICNVNHKPSNTKVDKKVEPKSCDKTHTCPPCPAPPVAGPSVFLFPPKPKDTLMISRTPEVTCVVVDVKHEDPEVKFNWYVDGVEVHNAKTKPREEQYNSTYRVVSVLTVLHQDWLNGKEYKCKVSNKALPAPIEKTISKAKGQPREPQVYTLPPSREQMTKNQVKLTCLVKGFYPSDIAVEWESNGQPENNYKTTPPVLDSDGSFFLYSKLTVDKSRWQQGNVFSCSVLHEALHSHYTQKSLSLSPGK

SEQ ID NO: 3209 - protein, 214 aa, synthetic construct; identical to SEQ ID NO: 2936
  source 1..214: note = XENP44678 Chain 3 - IGKV1-39_L1

SEQ ID NO: 3210 - protein, 450 aa, synthetic construct
  source 1..450: note = XENP44681 Chain 1 - 1A7[CD28]_H1.14_IgG1_pI(-)_Isosteric_A_PVA_/S267K/L368D/K37 0S/M428L/N434S
EVQLLESGGGLVQPGGSLRLSCAASGFTFSSYYMSWVRQAPGKGLEWVSTISESGDSTYYADSVKGRFTISRDNSKNTLYLQMNSLRAEDTAVYYCAKSGPGLRQVGFDYWGQGTLVTVSSASTKGPSVFPLAPSSKSTSGGTAALGCLVKDYFPEPVTVSWNSGALTSGVHTFPAVLQSSGLYSLSSVVTVPSSSLGTQTYICNVNHKPSDTKVDKKVEPKSCDKTHTCPPCPAPPVAGPSVFLFPPKPKDTLMISRTPEVTCVVVDVKHEDPEVKFNWYVDGVEVHNAKTKPREEEYNSTYRVVSVLTVLHQDWLNGKEYKCKVSNKALPAPIEKTISKAKGQPREPQVYTLPPSREEMTKNQVSLTCDVSGFYPSDIAVEWESDGQPENNYKTTPPVLDSDGSFFLYSKLTVDKSRWEQGDVFSCSVLHEALHSHYTQKSLSLSPGK

SEQ ID NO: 3211 - protein, 684 aa, synthetic construct; identical to SEQ ID NO: 3148
  source 1..684: note = XENP44681 Chain 2 - 1F12A4.249[PD-L2]_H1.1_(GKPGS)2_2A3A4.248[PD-L1]_H1.9_IgG1_ PVA_/S267K/S364K/E357Q/M428L/N434S

SEQ ID NO: 3212 - protein, 214 aa, synthetic construct; identical to SEQ ID NO: 2936
  source 1..214: note = XENP44681 Chain 3 - IGKV1-39_L1

SEQ ID NO: 3213 - protein, 449 aa, synthetic construct
  source 1..449: note = XENP39273 Chain 1 - Numax_VH_IgG1_pI(-)_Isosteric_A_/PVA_/S267K/L368D/K370S
QVTLRESGPALVKPTQTLTLTCTFSGFSLSTAGMSVGWIRQPPGKALEWLADIWWDDKKHYNPSLKDRLTISKDTSKNQVVLKVTNMDPADTATYYCARDMIFNFYFDVWGQGTTVTVSSASTKGPSVFPLAPSSKSTSGGTAALGCLVKDYFPEPVTVSWNSGALTSGVHTFPAVLQSSGLYSLSSVVTVPSSSLGTQTYICNVNHKPSDTKVDKKVEPKSCDKTHTCPPCPAPPVAGPSVFLFPPKPKDTLMISRTPEVTCVVVDVKHEDPEVKFNWYVDGVEVHNAKTKPREEEYNSTYRVVSVLTVLHQDWLNGKEYKCKVSNKALPAPIEKTISKAKGQPREPQVYTLPPSREEMTKNQVSLTCDVSGFYPSDIAVEWESDGQPENNYKTTPPVLDSDGSFFLYSKLTVDKSRWEQGDVFSCSVMHEALHNHYTQKSLSLSPGK

SEQ ID NO: 3214 - protein, 479 aa, synthetic construct; identical to SEQ ID NO: 1135
  source 1..479: note = XENP39273 Chain 2 - 1A7[CD28]_H1.14_L1.71_scFv(GKPGS)4_Fc(216)_IgG1_C220S/PVA_/ S267K/S364K/E357Q

SEQ ID NO: 3215 - protein, 213 aa, synthetic construct
  source 1..213: note = XENP39273 Chain 3 - Numax LC
DIQMTQSPSTLSASVGDRVTITCSASSRVGYMHWYQQKPGKAPKLLIYDTSKLASGVPSRFSGSGSGTEFTLTISSLQPDDFATYYCFQGSGYPFTFGGGTKVEIKRTVAAPSVFIFPPSDEQLKSGTASVVCLLNNFYPREAKVQWKVDNALQSGNSQESVTEQDSKDSTYSLSSTLTLSKADYEKHKVYACEVTHQGLSSPVTKSFNRGEC

SEQ ID NO: 3216 - protein, 449 aa, synthetic construct
  source 1..449: note = XENP43456 Chain 1 - Numax_VH_IgG1_pI(-)_Isosteric_A_PVA_/S267K/L368D/K370S/M428 L/N434S
QVTLRESGPALVKPTQTLTLTCTFSGFSLSTAGMSVGWIRQPPGKALEWLADIWWDDKKHYNPSLKDRLTISKDTSKNQVVLKVTNMDPADTATYYCARDMIFNFYFDVWGQGTTVTVSSASTKGPSVFPLAPSSKSTSGGTAALGCLVKDYFPEPVTVSWNSGALTSGVHTFPAVLQSSGLYSLSSVVTVPSSSLGTQTYICNVNHKPSDTKVDKKVEPKSCDKTHTCPPCPAPPVAGPSVFLFPPKPKDTLMISRTPEVTCVVVDVKHEDPEVKFNWYVDGVEVHNAKTKPREEEYNSTYRVVSVLTVLHQDWLNGKEYKCKVSNKALPAPIEKTISKAKGQPREPQVYTLPPSREEMTKNQVSLTCDVSGFYPSDIAVEWESDGQPENNYKTTPPVLDSDGSFFLYSKLTVDKSRWEQGDVFSCSVLHEALHSHYTQKSLSLSPGK

SEQ ID NO: 3217 - protein, 683 aa, synthetic construct; identical to SEQ ID NO: 3142
  source 1..683: note = XENP43456 Chain 2 - XPL2-16G11[PD-L2]_H3.7_(GKPGS)2_XPL1-13G7[PD-L1]_H2.18_IgG1 _PVA_/S267K/S364K/E357Q/M428L/N434S

SEQ ID NO: 3218 - protein, 214 aa, synthetic construct; identical to SEQ ID NO: 2686
  source 1..214: note = XENP43456 Chain 3 - 6B1_L1

SEQ ID NO: 3219 - protein, 449 aa, synthetic construct; identical to SEQ ID NO: 3216
  source 1..449: note = XENP43456 Chain 1 - Numax_H1_IgG1_pI(-)_Isosteric_A_PVA_/S267K/L368D/K370S/M428 L/N434S

SEQ ID NO: 3220 - protein, 683 aa, synthetic construct; identical to SEQ ID NO: 3142
  source 1..683: note = XENP43456 Chain 2 - XPL2-16G11[PD-L2]_H3.7_(GKPGS)2_XPL1-13G7[PD-L1]_H2.18_IgG1 _PVA_/S267K/S364K/E357Q/M428L/N434S

SEQ ID NO: 3221 - protein, 214 aa, synthetic construct; identical to SEQ ID NO: 2686
  source 1..214: note = XENP43456 Chain 3 - 6B1_L1

SEQ ID NO: 3222 - protein, 449 aa, synthetic construct; identical to SEQ ID NO: 3216
  source 1..449: note = XENP44796 Chain 1 - Numax_H1_IgG1_pI(-)_Isosteric_A_PVA_/S267K/L368D/K370S/M428 L/N434S

SEQ ID NO: 3223 - protein, 684 aa, synthetic construct; identical to SEQ ID NO: 3202
  source 1..684: note = XENP44796 Chain 2 - 1F12A4.249[PD-L2]_H1.45_(GKPGS)2_2A3A4.248[PD-L1]_H1.9_IgG1 _PVA_/S267K/S364K/E357Q/M428L/N434S

SEQ ID NO: 3224 - protein, 214 aa, synthetic construct; identical to SEQ ID NO: 2936
  source 1..214: note = XENP44796 Chain 3 - IGKV1-39_L1

SEQ ID NO: 3225 - protein, 450 aa, synthetic construct; identical to SEQ ID NO: 3186
  source 1..450: note = XENP44797 Chain 1 - 1A7[CD28]_H1.129_IgG1_pI(-)_Isosteric_A_PVA_/S267K/L368D/K3 70S/M428L/N434S

SEQ ID NO: 3226 - protein, 233 aa, synthetic construct
  source 1..233: note = XENP44797 Chain 2 - Numax_H1_(GKPGS)2_Numax_H1_IgG1_PVA_/S267K/S364K/E357Q/M428 L/N434S
QVTLRESGPALVKPTQTLTLTCTFSGFSLSTAGMSVGWIRQPPGKALEWLADIWWDDKKHYNPSLKDRLTISKDTSKNQVVLKVTNMDPADTATYYCARDMIFNFYFDVWGQGTTVTVSSASTKGPSVFPLAPSSKSTSGGTAALGCLVKDYFPEPVTVSWNSGALTSGVHTFPAVLQSSGLYSLSSVVTVPSSSLGTQTYICNVNHKPSNTKVDKKVEPKSCGKPGSGKPGS

SEQ ID NO: 3227 - protein, 449 aa, synthetic construct
  source 1..449: note = XENP44797 N434S
QVTLRESGPALVKPTQTLTLTCTFSGFSLSTAGMSVGWIRQPPGKALEWLADIWWDDKKHYNPSLKDRLTISKDTSKNQVVLKVTNMDPADTATYYCARDMIFNFYFDVWGQGTTVTVSSASTKGPSVFPLAPSSKSTSGGTAALGCLVKDYFPEPVTVSWNSGALTSGVHTFPAVLQSSGLYSLSSVVTVPSSSLGTQTYICNVNHKPSNTKVDKKVEPKSCDKTHTCPPCPAPPVAGPSVFLFPPKPKDTLMISRTPEVTCVVVDVKHEDPEVKFNWYVDGVEVHNAKTKPREEQYNSTYRVVSVLTVLHQDWLNGKEYKCKVSNKALPAPIEKTISKAKGQPREPQVYTLPPSREQMTKNQVKLTCLVKGFYPSDIAVEWESNGQPENNYKTTPPVLDSDGSFFLYSKLTVDKSRWQQGNVFSCSVLHEALHSHYTQKSLSLSPGK

SEQ ID NO: 3228 - protein, 214 aa, synthetic construct; identical to SEQ ID NO: 2936
  source 1..214: note = XENP44797 Chain 3 - IGKV1-39_L1

SEQ ID NO: 3229 - protein, 683 aa, synthetic construct
  source 1..683: note = XENP43734 Chain 1 - XPL2-16G11[PD-L2]_H3.7_(G4A)2_XPL1-13G7[PD-L1]_H2.18_mIgG2a a_L234A/L235A/P329G/F405L/R411T
QVQLQESGPGLVKPSGTLSLTCAVSGGSISSSNWWGWVRQPPGKGLEWIGEIFHIGLTNYNPSLKSRVTISVDKSKNQFSLKLSSVTAADTAVYYCARVSFGDSYYFDYWGQGTLVTVSSAKTTAPSVYPLAPVCGDTTGSSVTLGCLVKGYFPEPVTLTWNSGSLSSGVHTFPAVLQSDLYTLSSSVTVTSSTWPSQSITCNVAHPASSTKVDKKIEPRGPGGGGAGGGGAQVQLQESGPGLVKPSETLSLTCTVSGGSISGYFWSWIRQPPGKGLEWIGYIYYSGPTNYNPSLKSRVTISVDTSKNQFSLKLSSVTAADTAVYYCARGPLIQLWLAPFDYWGQGTLVTVSSAKTTAPSVYPLAPVCGDTTGSSVTLGCLVKGYFPEPVTLTWNSGSLSSGVHTFPAVLQSDLYTLSSSVTVTSSTWPSQSITCNVAHPASSTKVDKKIEPRGPTIKPCPPCKCPAPNAAGGPSVFIFPPKIKDVLMISLSPMVTCVVVDVSEDDPDVQISWFVNNVEVLTAQTQTHREDYNSTLRVVSALPIQHQDWMSGKEFKCKVNNKALGAPIERTISKPKGSVRAPQVYVLPPPEEEMTKKQVTLTCMVTDFMPEDIYVEWTNNGKTELNYKNTEPVLDSDGSYLMYSKLTVEKKNWVERNSYSCSVVHEGLHNHHTTKSFSRTPGK

SEQ ID NO: 3230 - protein, 481 aa, synthetic construct
  source 1..481: note = XENP43734 Chain 2 - 1A7[CD28]_H1.14_L1.71_scFv(GKPGS)4_Fc_mIgG2aa_L234A/L235A/P 329G/T370K/K409R
EVQLLESGGGLVQPGGSLRLSCAASGFTFSSYYMSWVRQAPGKGLEWVSTISESGDSTYYADSVKGRFTISRDNSKNTLYLQMNSLRAEDTAVYYCAKSGPGLRQVGFDYWGQGTLVTVSSGKPGSGKPGSGKPGSGKPGSDIQMTQSPSSLSASVGDRVTITCRASQSISSYLNWYQQKPGKAPKLLIYAASSLQSGVPSRFSGSGSGTDFTLTISSLQPEDFATYYCQQVYSTPFTFGQGTKLEIKEPRGPTIKPCPPCKCPAPNAAGGPSVFIFPPKIKDVLMISLSPMVTCVVVDVSEDDPDVQISWFVNNVEVLTAQTQTHREDYNSTLRVVSALPIQHQDWMSGKEFKCKVNNKALGAPIERTISKPKGSVRAPQVYVLPPPEEEMTKKQVTLTCMVKDFMPEDIYVEWTNNGKTELNYKNTEPVLDSDGSYFMYSRLRVEKKNWVERNSYSCSVVHEGLHNHHTTKSFSRTPGK

SEQ ID NO: 3231 - protein, 214 aa, synthetic construct
  source 1..214: note = XENP43734 Chain 3 - 6B1_L1 Light Chain
EIVLTQSPATLSLSPGERATLSCRASQSVSSYLAWYQQKPGQAPRLLIYDASNRATGIPARFSGSGSGTDFTLTISSLEPEDFAVYYCQQRSNWPPTFGQGTKVEIKRADAAPTVSIFPPSSEQLTSGGASVVCFLNNFYPKDINVKWKIDGSERQNGVLNSWTDQDSKDSTYSMSSTLTLTKDEYERHNSYTCEATHKTSTSPIVKSFNRNEC

SEQ ID NO: 3232 - protein, 683 aa, synthetic construct; identical to SEQ ID NO: 3229
  source 1..683: note = XENP43735 Chain 1 - XPL2-16G11[PD-L2]_H3.7_(G4A)2_XPL1-13G7[PD-L1]_H2.18_mIgG2a a_L234A/L235A/P329G/F405L/R411T

SEQ ID NO: 3233 - protein, 479 aa, synthetic construct
  source 1..479: note = XENP43735 Chain 2 - Numax_VHVL_scFv(GKPGS)4_Fc_mIgG2aa_L234A/L235A/P329G/T370K/ K409R
QVTLRESGPALVKPTQTLTLTCTFSGFSLSTAGMSVGWIRQPPGKALEWLADIWWDDKKHYNPSLKDRLTISKDTSKNQVVLKVTNMDPADTATYYCARDMIFNFYFDVWGQGTTVTVSSGKPGSGKPGSGKPGSGKPGSDIQMTQSPSTLSASVGDRVTITCSASSRVGYMHWYQQKPGKAPKLLIYDTSKLASGVPSRFSGSGSGTEFTLTISSLQPDDFATYYCFQGSGYPFTFGGGTKVEIKEPRGPTIKPCPPCKCPAPNAAGGPSVFIFPPKIKDVLMISLSPMVTCVVVDVSEDDPDVQISWFVNNVEVLTAQTQTHREDYNSTLRVVSALPIQHQDWMSGKEFKCKVNNKALGAPIERTISKPKGSVRAPQVYVLPPPEEEMTKKQVTLTCMVKDFMPEDIYVEWTNNGKTELNYKNTEPVLDSDGSYFMYSRLRVEKKNWVERNSYSCSVVHEGLHNHHTTKSFSRTPGK

SEQ ID NO: 3234 - protein, 214 aa, synthetic construct; identical to SEQ ID NO: 3231
  source 1..214: note = XENP43735 Chain 3 - 6B1_L1 Light Chain

SEQ ID NO: 3235 - protein, 122 aa, synthetic construct
  source 1..122: note = 2A3A4.248[PDL1]_H1L1 Variable heavy (vh) domain
QVQLVQSGAEVKKPGSSVKVSCKASGGTFSRYAISWVRQAPGQGLEWMGGIVPIFGKPNYAQKFQGRVTITADESTSTAYMELSSLRSEDTAVYYCARDDWAGPYEWTFDYWGQGTLVTVSS

SEQ ID NO: 3236 - protein, 10 aa, synthetic construct
  source 1..10: note = 2A3A4.248[PDL1]_H1L1 vhCDR1
GGTFSRYAIS

SEQ ID NO: 3237 - protein, 17 aa, synthetic construct
  source 1..17: note = 2A3A4.248[PDL1]_H1L1 vhCDR2
GIVPIFGKPNYAQKFQG

SEQ ID NO: 3238 - protein, 13 aa, synthetic construct
  source 1..13: note = 2A3A4.248[PDL1]_H1L1 vhCDR3
DDWAGPYEWTFDY

SEQ ID NO: 3239 - protein, 107 aa, synthetic construct
  source 1..107: note = 2A3A4.248[PDL1]_H1L1 Variable light (vl) domain
DIQMTQSPSSLSASVGDRVTITCRASQSISSYLNWYQQKPGKAPKLLIYAASSLQSGVPSRFSGSGSGTDFTLTISSLQPEDFATYYCQQSYSTPYTFGQGTKLEIK

SEQ ID NO: 3240 - protein, 11 aa, synthetic construct
  source 1..11: note = 2A3A4.248[PDL1]_H1L1 vlCDR1
RASQSISSYLN

SEQ ID NO: 3241 - protein, 7 aa, synthetic construct
  source 1..7: note = 2A3A4.248[PDL1]_H1L1 vlCDR2
AASSLQS

SEQ ID NO: 3242 - protein, 9 aa, synthetic construct
  source 1..9: note = 2A3A4.248[PDL1]_H1L1 vlCDR3
QQSYSTPYT

SEQ ID NO: 3243 - protein, 122 aa, synthetic construct
  source 1..122: note = 2A3A4.248[PDL1]_H1.1
QVQLVQSGAEVKKPGSSVKVSCKASGGTFSRYAMSWVRQAPGQGLEWMGGIVPIFGYPNYAQKFQGRVTITADESTSTAYMELSSLRSEDTAVYYCARDDWAGPYEWTFDYWGQGTLVTVSS

SEQ ID NO: 3244 - protein, 122 aa, synthetic construct
  source 1..122: note = 2A3A4.248[PDL1]_H1.2
QVQLVQSGAEVKKPGSSVKVSCKASGGTFSRYAISWVRQAPGQGLEWMGGIVPAFGKPNYAQKFQGRVTITADESTSTAYMELSSLRSEDTAVYYCARDDWAGPYEWTFDYWGQGTLVTVSS

SEQ ID NO: 3245 - protein, 122 aa, synthetic construct
  source 1..122: note = 2A3A4.248[PDL1]_H1.3
QVQLVQSGAEVKKPGSSVKVSCKASGGTFFRYAISWVRQAPGQGLEWMGGIVPIFGYPAYAQKFQGRVTITADESTSTAYMELSSLRSEDTAVYYCARDDWAGPYEWTFDYWGQGTLVTVSS

SEQ ID NO: 3246 - protein, 122 aa, synthetic construct
  source 1..122: note = 2A3A4.248[PDL1]_H1.4
QVQLVQSGAEVKKPGSSVKVSCKASGGTFSRYAISWVRQAPGQGLEWMGGIVPIFGYPNYAQKFQGRVTITADESTSTAYMELSSLRSEDTAVYYCARDDWAGPYEWTFDYWGQGTLVTVSS

SEQ ID NO: 3247 - protein, 122 aa, synthetic construct
  source 1..122: note = 2A3A4.248[PDL1]_H1.5
QVQLVQSGAEVKKPGSSVKVSCKASGGTFSRYAISWVRQAPGQGLEWMGGIVPAFGYPNYAQKFQGRVTITADESTSTAYMELSSLRSEDTAVYYCARDDWAGPYEWTFDYWGQGTLVTVSS

SEQ ID NO: 3248 - protein, 122 aa, synthetic construct
  source 1..122: note = 2A3A4.248[PDL1]_H1.6
QVQLVQSGAEVKKPGSSVKVSCKASGGTFSRYAISWVRQAPGQGLEWMGGIVPAFGKPAYAQKFQGRVTITADESTSTAYMELSSLRSEDTAVYYCARDDWAGPYEWTFDYWGQGTLVTVSS

SEQ ID NO: 3249 - protein, 122 aa, synthetic construct
  source 1..122: note = 2A3A4.248[PDL1]_H1.7
QVQLVQSGAEVKKPGSSVKVSCKASGGTFSRYAISWVRQAPGQGLEWMGGIVPIFGYPAYAQKFQGRVTITADESTSTAYMELSSLRSEDTAVYYCARDDWAGPYEWTFDYWGQGTLVTVSS

SEQ ID NO: 3250 - protein, 122 aa, synthetic construct
  source 1..122: note = 2A3A4.248[PDL1]_H1.8
QVQLVQSGAEVKKPGSSVKVSCKASGGTFFRYAISWVRQAPGQGLEWMGGIVPAFGYPNYAQKFQGRVTITADESTSTAYMELSSLRSEDTAVYYCARDDWAGPYEWTFDYWGQGTLVTVSS

SEQ ID NO: 3251 - protein, 122 aa, synthetic construct
  source 1..122: note = 2A3A4.248[PDL1]_H1.9
QVQLVQSGAEVKKPGSSVKVSCKASGGTFSRYAISWVRQAPGQGLEWMGGIVPAFGYPAYAQKFQGRVTITADESTSTAYMELSSLRSEDTAVYYCARDDWAGPYEWTFDYWGQGTLVTVSS

SEQ ID NO: 3252 - protein, 122 aa, synthetic construct
  source 1..122: note = 2A3A4.248[PDL1]_H1.10
QVQLVQSGAEVKKPGSSVKVSCKASGGTFFRYAMSWVRQAPGQGLEWMGGIVPIFGYPAYAQKFQGRVTITADESTSTAYMELSSLRSEDTAVYYCARDDWAGPYEWTFDYWGQGTLVTVSS

SEQ ID NO: 3253 - protein, 122 aa, synthetic construct
  source 1..122: note = 2A3A4.248[PDL1]_H1.11
QVQLVQSGAEVKKPGSSVKVSCKASGGTFFRYAISWVRQAPGQGLEWMGGIVPAFGYPAYAQKFQGRVTITADESTSTAYMELSSLRSEDTAVYYCARDDWAGPYEWTFDYWGQGTLVTVSS

SEQ ID NO: 3254 - protein, 122 aa, synthetic construct
  source 1..122: note = 2A3A4.248[PDL1]_H1.12
QVQLVQSGAEVKKPGSSVKVSCKASGGTFFRYAMSWVRQAPGQGLEWMGGIVPAFGYPAYAQKFQGRVTITADESTSTAYMELSSLRSEDTAVYYCARDDWAGPYEWTFDYWGQGTLVTVSS

SEQ ID NO: 3255 - protein, 122 aa, synthetic construct
  source 1..122: note = 2A3A4.248[PDL1]_H1.13
QVQLVQSGAEVKKPGSSVKVSCKASGGVFSRYAMSWVRQAPGQGLEWMGGIVPRFGMPNYAQKFQGRVTITADESTSTAYMELSSLRSEDTAVYYCARDDWAGPYEWTFDYWGQGTLVTVSS

SEQ ID NO: 3256 - protein, 122 aa, synthetic construct
  source 1..122: note = 2A3A4.248[PDL1]_H1.13v2
QVQLVQSGAEVKKPGSSVKVSCKASGGTFSSYAISWVRQAPGQGLEWMGGIVPIFGKPNYAQKFQGRVTITADESTSTAYMELSSLRSEDTAVYYCARDDWAGPYEWTFDYWGQGTLVTVSS

SEQ ID NO: 3257 - protein, 122 aa, synthetic construct
  source 1..122: note = 2A3A4.248[PDL1]_H1.14
QVQLVQSGAEVKKPGSSVKVSCKASGGTFSRYAISWVRQAPGQGLEWMGGIVPIFGKPNYAQKFQGRVTITADESTSTAYMELSSLRSEDTAVYYCARDDFAGPYEWTFDYWGQGTLVTVSS

SEQ ID NO: 3258 - protein, 122 aa, synthetic construct
  source 1..122: note = 2A3A4.248[PDL1]_H1.15
QVQLVQSGAEVKKPGSSVKVSCKASGGTFSRYAISWVRQAPGQGLEWMGGIVPIFGKPNYAQKFQGRVTITADESTSTAYMELSSLRSEDTAVYYCARDDWAGPFEWTFDYWGQGTLVTVSS

SEQ ID NO: 3259 - protein, 122 aa, synthetic construct
  source 1..122: note = 2A3A4.248[PDL1]_H1.16
QVQLVQSGAEVKKPGSSVKVSCKASGGTFSRYAISWVRQAPGQGLEWMGGIVPIFGKPNYAQKFQGRVTITADESTSTAYMELSSLRSEDTAVYYCARDDWAGPYEFTFDYWGQGTLVTVSS

SEQ ID NO: 3260 - protein, 122 aa, synthetic construct
  source 1..122: note = 2A3A4.248[PDL1]_H1.17
QVQLVQSGAEVKKPGSSVKVSCKASGGTFSRYAISWVRQAPGQGLEWMGGIVPIFGKPNYAQKFQGRVTITADESTSTAYMELSSLRSEDTAVYYCARDDWAGPYEWYFDYWGQGTLVTVSS

SEQ ID NO: 3261 - protein, 30 aa, synthetic construct
  source 1..30: note = 2A3A4.248 VH HFR1
  VARIANT 28: note = T or V
  VARIANT 30: note = S or F
QVQLVQSGAEVKKPGSSVKVSCKASGGXFX

SEQ ID NO: 3262 - protein, 14 aa, synthetic construct
  source 1..14: note = 2A3A4.248 VH HFR2
WVRQAPGQGLEWMG

SEQ ID NO: 3263 - protein, 17 aa, synthetic construct
  source 1..17: note = 2A3A4.248 VH HCDR2
  VARIANT 5: note = I, A or R
  VARIANT 8: note = Y, K or M
  VARIANT 10: note = N or A
GIVPXFGXPXYAQKFQG

SEQ ID NO: 3264 - protein, 32 aa, synthetic construct
  source 1..32: note = 2A3A4.248 VH HFR3
RVTITADESTSTAYMELSSLRSEDTAVYYCAR

SEQ ID NO: 3265 - protein, 13 aa, synthetic construct
  source 1..13: note = 2A3A4.248 VH HCDR3
  VARIANT 3: note = W or F
  VARIANT 7: note = Y or F
  VARIANT 9: note = W or F
  VARIANT 10: note = T or Y
DDXAGPXEXXFDY

SEQ ID NO: 3266 - protein, 11 aa, synthetic construct
  source 1..11: note = 2A3A4.248 VH HFR4
WGQGTLVTVSS

SEQ ID NO: 3267 - protein, 120 aa, synthetic construct
  source 1..120: note = 1F12A4.249[PDL2]_H1L1 Variable heavy (vh) domain
QVQLVQSGAEVKKPGSSVKVSCKASGGTFSNYVISWVRQAPGQGLEWMGGIIPIFGAVNYAPKFQGRVTITADESTSTAYMELSSLRSEDTAVYYCAREVSRPGTEFDYWGQGTLVTVSS

SEQ ID NO: 3268 - protein, 10 aa, synthetic construct
  source 1..10: note = 1F12A4.249[PDL2]_H1L1 vhCDR1
GGTFSNYVIS

SEQ ID NO: 3269 - protein, 17 aa, synthetic construct
  source 1..17: note = 1F12A4.249[PDL2]_H1L1 vhCDR2
GIIPIFGAVNYAPKFQG

SEQ ID NO: 3270 - protein, 11 aa, synthetic construct
  source 1..11: note = 1F12A4.249[PDL2]_H1L1 vhCDR3
EVSRPGTEFDY

SEQ ID NO: 3271 - protein, 107 aa, synthetic construct; identical to SEQ ID NO: 3239
  source 1..107: note = 1F12A4.249[PDL2]_H1L1 Variable light (vl) domain

SEQ ID NO: 3272 - protein, 11 aa, synthetic construct
  source 1..11: note = 1F12A4.249[PDL2]_H1L1 vlCDR1
RASQSISSYLN

SEQ ID NO: 3273 - protein, 7 aa, synthetic construct
  source 1..7: note = 1F12A4.249[PDL2]_H1L1 vlCDR2
AASSLQS

SEQ ID NO: 3274 - protein, 9 aa, synthetic construct
  source 1..9: note = 1F12A4.249[PDL2]_H1L1 vlCDR3
QQSYSTPYT

SEQ ID NO: 3275 - protein, 120 aa, synthetic construct
  source 1..120: note = 1F12A4.249[PD-L2]_H1.1
QVQLVQSGAEVKKPGSSVKVSCKASGGTFSNSVMSWVRQAPGQGLEWMGGIIPIFLAVNYAPKFQGRVTITADESTSTAYMELSSLRSEDTAVYYCAREVSRPGTEFDYWGQGTLVTVSS

SEQ ID NO: 3276 - protein, 120 aa, synthetic construct
  source 1..120: note = 1F12A4.249[PD-L2]_H1.2
QVQLVQSGAEVKKPGSSVKVSCKASGGTFSNSVMSWVRQAPGQGLEWMGGIIPIFVAVNYAPKFQGRVTITADESTSTAYMELSSLRSEDTAVYYCAREVSRPGTEFDYWGQGTLVTVSS

SEQ ID NO: 3277 - protein, 120 aa, synthetic construct
  source 1..120: note = 1F12A4.249[PD-L2]_H1.3
QVQLVQSGAEVKKPGSSVKVSCKASGGTFSWIVISWVRQAPGQGLEWMGGIIPIFMAVNYAPKFQGRVTITADESTSTAYMELSSLRSEDTAVYYCAREVSRPGTEFDYWGQGTLVTVSS

SEQ ID NO: 3278 - protein, 120 aa, synthetic construct
  source 1..120: note = 1F12A4.249[PD-L2]_H1.4
QVQLVQSGAEVKKPGSSVKVSCKASGGTFSWIVISWVRQAPGQGLEWMGGIIPIFVAVNYAPKFQGRVTITADESTSTAYMELSSLRSEDTAVYYCAREVSRPGTEFDYWGQGTLVTVSS

SEQ ID NO: 3279 - protein, 120 aa, synthetic construct
  source 1..120: note = 1F12A4.249[PD-L2]_H1.5
QVQLVQSGAEVKKPGSSVKVSCKASGGTFSNIVISWVRQAPGQGLEWMGGIIPIFVAVNYAPKFQGRVTITADESTSTAYMELSSLRSEDTAVYYCAREVSRPGTEFDYWGQGTLVTVSS

SEQ ID NO: 3280 - protein, 120 aa, synthetic construct
  source 1..120: note = 1F12A4.249[PD-L2]_H1.6
QVQLVQSGAEVKKPGSSVKVSCKASGGTFSRYVMSWVRQAPGQGLEWMGGIIPIFVAVNYAQKFQGRVTITADESTSTAYMELSSLRSEDTAVYYCAREVSRPGTEFDYWGQGTLVTVSS

SEQ ID NO: 3281 - protein, 120 aa, synthetic construct
  source 1..120: note = 1F12A4.249[PD-L2]_H1.7
QVQLVQSGAEVKKPGSSVKVSCKASGGTFSRYVMQWVRQAPGQGLEWMGGIIPIFLAVNYAQKFQGRVTITADESTSTAYMELSSLRSEDTAVYYCAREVSRPGTEFDYWGQGTLVTVSS

SEQ ID NO: 3282 - protein, 120 aa, synthetic construct
  source 1..120: note = 1F12A4.249[PD-L2]_H1.8
QVQLVQSGAEVKKPGSSVKVSCKASGGTFSRYVMSWVRQAPGQGLEWMGGIIPIFLASNYAQKFQGRVTITADESTSTAYMELSSLRSEDTAVYYCAREVSRPGTEFDYWGQGTLVTVSS

SEQ ID NO: 3283 - protein, 120 aa, synthetic construct
  source 1..120: note = 1F12A4.249[PD-L2]_H1.9
QVQLVQSGAEVKKPGSSVKVSCKASGGTFSRYVISWVRQAPGQGLEWMGGIIPIFLAVNYAQKFQGRVTITADESTSTAYMELSSLRSEDTAVYYCAREVSRPGTEFDYWGQGTLVTVSS

SEQ ID NO: 3284 - protein, 120 aa, synthetic construct
  source 1..120: note = 1F12A4.249[PD-L2]_H1.10
QVQLVQSGAEVKKPGSSVKVSCKASGGTFSTYVMQWVRQAPGQGLEWMGGIIPIFGAVNYAPKFQGRVTITADESTSTAYMELSSLRSEDTAVYYCAREVSRPGTEFDYWGQGTLVTVSS

SEQ ID NO: 3285 - protein, 120 aa, synthetic construct
  source 1..120: note = 1F12A4.249[PD-L2]_H1.11
QVQLVQSGAEVKKPGSSVKVSCKASGGTFSTYVMQWVRQAPGQGLEWMGGIIPIFLAVNYAPKFQGRVTITADESTSTAYMELSSLRSEDTAVYYCAREVSRPGTEFDYWGQGTLVTVSS

SEQ ID NO: 3286 - protein, 120 aa, synthetic construct
  source 1..120: note = 1F12A4.249[PD-L2]_H1.12
QVQLVQSGAEVKKPGSSVKVSCKASGGTFSTYVMQWVRQAPGQGLEWMGGIIPIFMAVNYAPKFQGRVTITADESTSTAYMELSSLRSEDTAVYYCAREVSRPGTEFDYWGQGTLVTVSS

SEQ ID NO: 3287 - protein, 120 aa, synthetic construct
  source 1..120: note = 1F12A4.249[PD-L2]_H1.13
QVQLVQSGAEVKKPGSSVKVSCKASGGTFYNSVMSWVRQAPGQGLEWMGGIIPIFGASNYTQKFQGRVTITADESTSTAYMELSSLRSEDTAVYYCAREVSRPGTEFDYWGQGTLVTVSS

SEQ ID NO: 3288 - protein, 120 aa, synthetic construct
  source 1..120: note = 1F12A4.249[PD-L2]_H1.14
QVQLVQSGAEVKKPGSSVKVSCKASGGTFYNSVISWVRQAPGQGLEWMGGIIPIFGASNYTQKFQGRVTITADESTSTAYMELSSLRSEDTAVYYCAREVSRPGTEFDYWGQGTLVTVSS

SEQ ID NO: 3289 - protein, 120 aa, synthetic construct
  source 1..120: note = 1F12A4.249[PD-L2]_H1.15
QVQLVQSGAEVKKPGSSVKVSCKASGGTFSNSVMSWVRQAPGQGLEWMGGIIPIFLAVNYAPKFQGRVTITADESTSTAYMELSSLRSEDTAVYYCAREVSRPGTEFDSWGQGTLVTVSS

SEQ ID NO: 3290 - protein, 120 aa, synthetic construct
  source 1..120: note = 1F12A4.249[PD-L2]_H1.16
QVQLVQSGAEVKKPGSSVKVSCKASGGTFSNSVMSWVRQAPGQGLEWMGGIIPIFLAVNYAPKFQGRVTITADESTSTAYMELSSLRSEDTAVYYCARENSRPGTEFDYWGQGTLVTVSS

SEQ ID NO: 3291 - protein, 120 aa, synthetic construct
  source 1..120: note = 1F12A4.249[PD-L2]_H1.17
QVQLVQSGAEVKKPGSSVKVSCKASGWDFSNSVMSWVRQAPGQGLEWMGGIIPIFLAVNYAPKFQGRVTITADESTSTAYMELSSLRSEDTAVYYCAREVSRPGTEFDYWGQGTLVTVSS

SEQ ID NO: 3292 - protein, 120 aa, synthetic construct
  source 1..120: note = 1F12A4.249[PD-L2]_H1.18
QVQLVQSGAEVKKPGSSVKVSCKASGATFSNSVMSWVRQAPGQGLEWMGGIIPIFLAVNYAPKFQGRVTITADESTSTAYMELSSLRSEDTAVYYCAREVSRPGTEFDYWGQGTLVTVSS

SEQ ID NO: 3293 - protein, 120 aa, synthetic construct
  source 1..120: note = 1F12A4.249[PD-L2]_H1.19
QVQLVQSGAEVKKPGSSVKVSCKASGGTFSASVMSWVRQAPGQGLEWMGGIIPIFLAVNYAPKFQGRVTITADESTSTAYMELSSLRSEDTAVYYCAREVSRPGTEFDYWGQGTLVTVSS

SEQ ID NO: 3294 - protein, 120 aa, synthetic construct
  source 1..120: note = 1F12A4.249[PD-L2]_H1.20
QVQLVQSGAEVKKPGSSVKVSCKASGGTFSNSVMSWVRQAPGQGLEWMGGIIPIFLAVNYAPKFQGRVTITADESTSTAYMELSSLRSEDTAVYYCAREVSRPGTEFDAWGQGTLVTVSS

SEQ ID NO: 3295 - protein, 120 aa, synthetic construct
  source 1..120: note = 1F12A4.249[PD-L2]_H1.21
QVQLVQSGAEVKKPGSSVKVSCKASGSWFSNSVMSWVRQAPGQGLEWMGGIIPIFLAVNYAPKFQGRVTITADESTSTAYMELSSLRSEDTAVYYCAREVSRPGTEFDYWGQGTLVTVSS

SEQ ID NO: 3296 - protein, 120 aa, synthetic construct
  source 1..120: note = 1F12A4.249[PD-L2]_H1.22
QVQLVQSGAEVKKPGSSVKVSCKASGGTFSNSVMSWVRQAPGQGLEWMGGIIPIFLAVNYAPKFQGRVTITADESTSTAYMELSSLRSEDTAVYYCAREVSRPGTEFDNWGQGTLVTVSS

SEQ ID NO: 3297 - protein, 120 aa, synthetic construct
  source 1..120: note = 1F12A4.249[PD-L2]_H1.23
QVQLVQSGAEVKKPGSSVKVSCKASGGTFANSVMSWVRQAPGQGLEWMGGIIPIFLAVNYAPKFQGRVTITADESTSTAYMELSSLRSEDTAVYYCAREVSRPGTEFDYWGQGTLVTVSS

SEQ ID NO: 3298 - protein, 120 aa, synthetic construct
  source 1..120: note = 1F12A4.249[PD-L2]_H1.24
QVQLVQSGAEVKKPGSSVKVSCKASGGTFSKSVMSWVRQAPGQGLEWMGGIIPLFLAVNYAPKFQGRVTITADESTSTAYMELSSLRSEDTAVYYCAREVSRPGTEFDYWGQGTLVTVSS

SEQ ID NO: 3299 - protein, 120 aa, synthetic construct
  source 1..120: note = 1F12A4.249[PD-L2]_H1.25
QVQLVQSGAEVKKPGSSVKVSCKASGGLFSNSIMSWVRQAPGQGLEWMGGIIPIFLAVNYAPKFQGRVTITADESTSTAYMELSSLRSEDTAVYYCAREVSRPGTEFDYWGQGTLVTVSS

SEQ ID NO: 3300 - protein, 120 aa, synthetic construct
  source 1..120: note = 1F12A4.249[PD-L2]_H1.26
QVQLVQSGAEVKKPGSSVKVSCKASGGTFSFSVMSWVRQAPGQGLEWMGGIIPIFLAVNYAPKFQGRVTITADESTSTAYMELSSLRSEDTAVYYCAREVVRPGTEFDYWGQGTLVTVSS

SEQ ID NO: 3301 - protein, 120 aa, synthetic construct
  source 1..120: note = 1F12A4.249[PD-L2]_H1.27
QVQLVQSGAEVKKPGSSVKVSCKASGGTFSISVMSWVRQAPGQGLEWMGGIIPIFLAVNYAPKFQGRVTITADESTSTAYMELSSLRSEDTAVYYCAREVSRPGTEFDYWGQGTLVTVSS

SEQ ID NO: 3302 - protein, 120 aa, synthetic construct
  source 1..120: note = 1F12A4.249[PD-L2]_H1.28
QVQLVQSGAEVKKPGSSVKVSCKASGGSFSNSVMSWVRQAPGQGLEWMGGIIPIFLAVNYAPKFQGRVTITADESTSTAYMELSSLRSEDTAVYYCAREVFRPGTEFDYWGQGTLVTVSS

SEQ ID NO: 3303 - protein, 120 aa, synthetic construct
  source 1..120: note = 1F12A4.249[PD-L2]_H1.29
QVQLVQSGAEVKKPGSSVKVSCKASGGTFSNSVMSWVRQAPGQGLEWMGGIIPIFLAVNYAPKFQGRVTITADESTSTAYMELSSLRSEDTAVYYCAREVIRPGTEFDWWGQGTLVTVSS

SEQ ID NO: 3304 - protein, 120 aa, synthetic construct
  source 1..120: note = 1F12A4.249[PD-L2]_H1.30
QVQLVQSGAEVKKPGSSVKVSCKASGGTFSLSVMSWVRQAPGQGLEWMGGIIPIFLAVNYAPKFQGRVTITADESTSTAYMELSSLRSEDTAVYYCAREVSRPGTEFDYWGQGTLVTVSS

SEQ ID NO: 3305 - protein, 120 aa, synthetic construct
  source 1..120: note = 1F12A4.249[PD-L2]_H1.31
QVQLVQSGAEVKKPGSSVKVSCKASGGTFSKSVMSWVRQAPGQGLEWMGGIIPIFLAVNYAPKFQGRVTITADESTSTAYMELSSLRSEDTAVYYCAREVSRPGTEFDYWGQGTLVTVSS

SEQ ID NO: 3306 - protein, 120 aa, synthetic construct
  source 1..120: note = 1F12A4.249[PD-L2]_H1.32
QVQLVQSGAEVKKPGSSVKVSCKASGGTFLNSVMSWVRQAPGQGLEWMGGIIPIFLAVNYAPKFQGRVTITADESTSTAYMELSSLRSEDTAVYYCAREPSRPGTEFDYWGQGTLVTVSS

SEQ ID NO: 3307 - protein, 120 aa, synthetic construct
  source 1..120: note = 1F12A4.249[PD-L2]_H1.33
QVQLVQSGAEVKKPGSSVKVSCKASGGGFSNSVMSWVRQAPGQGLEWMGGIIPIFLAVNYAPKFQGRVTITADESTSTAYMELSSLRSEDTAVYYCAREISRPGTEFDYWGQGTLVTVSS

SEQ ID NO: 3308 - protein, 120 aa, synthetic construct
  source 1..120: note = 1F12A4.249[PD-L2]_H1.34
QVQLVQSGAEVKKPGSSVKVSCKASGGTFSSSVMSWVRQAPGQGLEWMGGIIPIFLAVNYAPKFQGRVTITADESTSTAYMELSSLRSEDTAVYYCAREVSRPGTEFDYWGQGTLVTVSS

SEQ ID NO: 3309 - protein, 120 aa, synthetic construct
  source 1..120: note = 1F12A4.249[PD-L2]_H1.35
QVQLVQSGAEVKKPGSSVKVSCKASGQTFSNSVMSWVRQAPGQGLEWMGGIIPIFLAVNYAPKFQGRVTITADESTSTAYMELSSLRSEDTAVYYCAREVSRPGTEFDYWGQGTLVTVSS

SEQ ID NO: 3310 - protein, 120 aa, synthetic construct
  source 1..120: note = 1F12A4.249[PD-L2]_H1.36
QVQLVQSGAEVKKPGSSVKVSCKASGGTFVNSVMSWVRQAPGQGLEWMGGIIPIFLAVNYAPKFQGRVTITADESTSTAYMELSSLRSEDTAVYYCAREVSRPGTEFDYWGQGTLVTVSS

SEQ ID NO: 3311 - protein, 120 aa, synthetic construct
  source 1..120: note = 1F12A4.249[PD-L2]_H1.37
QVQLVQSGAEVKKPGSSVKVSCKASGGSFSNSVMSWVRQAPGQGLEWMGGIIPFFLAVNYAPKFQGRVTITADESTSTAYMELSSLRSEDTAVYYCAREVSRPGTEFDYWGQGTLVTVSS

SEQ ID NO: 3312 - protein, 120 aa, synthetic construct
  source 1..120: note = 1F12A4.249[PD-L2]_H1.38
QVQLVQSGAEVKKPGSSVKVSCKASGGTFSNSIMSWVRQAPGQGLEWMGGIIPIFLAVNYAPKFQGRVTITADESTSTAYMELSSLRSEDTAVYYCAREVSRPGTEFDYWGQGTLVTVSS

SEQ ID NO: 3313 - protein, 120 aa, synthetic construct
  source 1..120: note = 1F12A4.249[PD-L2]_H1.39
QVQLVQSGAEVKKPGSSVKVSCKASGSTFSNSVMSWVRQAPGQGLEWMGGIIPIFLAVNYAPKFQGRVTITADESTSTAYMELSSLRSEDTAVYYCAREVSRPGTEFDYWGQGTLVTVSS

SEQ ID NO: 3314 - protein, 120 aa, synthetic construct
  source 1..120: note = 1F12A4.249[PD-L2]_H1.40
QVQLVQSGAEVKKPGSSVKVSCKASGGTFSNSVMSWVRQAPGQGLEWMGGIIPFFLAVNYAPKFQGRVTITADESTSTAYMELSSLRSEDTAVYYCAREVSRPGTEFDYWGQGTLVTVSS

SEQ ID NO: 3315 - protein, 120 aa, synthetic construct
  source 1..120: note = 1F12A4.249[PD-L2]_H1.41
QVQLVQSGAEVKKPGSSVKVSCKASGGTFSASVMSWVRQAPGQGLEWMGGIIPIFLAVNYAPKFQGRVTITADESTSTAYMELSSLRSEDTAVYYCARELSRPGTEFDYWGQGTLVTVSS

SEQ ID NO: 3316 - protein, 120 aa, synthetic construct
  source 1..120: note = 1F12A4.249[PD-L2]_H1.42
QVQLVQSGAEVKKPGSSVKVSCKASGGTFVNSVMSWVRQAPGQGLEWMGGIIPIFLAVNYAPKFQGRVTITADESTSTAYMELSSLRSEDTAVYYCAREISRPGTEFDYWGQGTLVTVSS

SEQ ID NO: 3317 - protein, 120 aa, synthetic construct
  source 1..120: note = 1F12A4.249[PD-L2]_H1.43
QVQLVQSGAEVKKPGSSVKVSCKASGWTFSNSVMSWVRQAPGQGLEWMGGIIPIFLAINYAPKFQGRVTITADESTSTAYMELSSLRSEDTAVYYCAREVSRPGTEFDYWGQGTLVTVSS

SEQ ID NO: 3318 - protein, 120 aa, synthetic construct
  source 1..120: note = 1F12A4.249[PD-L2]_H1.44
QVQLVQSGAEVKKPGSSVKVSCKASGGTFLNSVMSWVRQAPGQGLEWMGGIIPIFLAVNYAPKFQGRVTITADESTSTAYMELSSLRSEDTAVYYCAREVSRPGTEFDYWGQGTLVTVSS

SEQ ID NO: 3319 - protein, 120 aa, synthetic construct
  source 1..120: note = 1F12A4.249[PD-L2]_H1.45
QVQLVQSGAEVKKPGSSVKVSCKASGWTFSNSVMSWVRQAPGQGLEWMGGIIPIFLAVNYAPKFQGRVTITADESTSTAYMELSSLRSEDTAVYYCAREVSRPGTEFDYWGQGTLVTVSS

SEQ ID NO: 3320 - protein, 120 aa, synthetic construct
  source 1..120: note = 1F12A4.249[PD-L2]_H1.46
QVQLVQSGAEVKKPGSSVKVSCKASGGFFSNSVMSWVRQAPGQGLEWMGGIIPIFLAVNYAPKFQGRVTITADESTSTAYMELSSLRSEDTAVYYCAREVTRPGTEFDYWGQGTLVTVSS

SEQ ID NO: 3321 - protein, 120 aa, synthetic construct
  source 1..120: note = 1F12A4.249[PD-L2]_H1.47
QVQLVQSGAEVKKPGSSVKVSCKASGGKFSNSVMSWVRQAPGQGLEWMGGIIPIFLAVNYAPKFQGRVTITADESTSTAYMELSSLRSEDTAVYYCAREVLRPGTEFDYWGQGTLVTVSS

SEQ ID NO: 3322 - protein, 120 aa, synthetic construct
  source 1..120: note = 1F12A4.249[PD-L2]_H1.48
QVQLVQSGAEVKKPGSSVKVSCKASGGTFFNSVMSWVRQAPGQGLEWMGGIIPIFLAVNYAPKFQGRVTITADESTSTAYMELSSLRSEDTAVYYCAREVSRPGTEFDYWGQGTLVTVSS

SEQ ID NO: 3323 - protein, 120 aa, synthetic construct
  source 1..120: note = 1F12A4.249[PD-L2]_H1.49
QVQLVQSGAEVKKPGSSVKVSCKASGGTFSGSVMSWVRQAPGQGLEWMGGIIPQFLAVNYAPKFQGRVTITADESTSTAYMELSSLRSEDTAVYYCAREVSRPGTEFDYWGQGTLVTVSS

SEQ ID NO: 3324 - protein, 120 aa, synthetic construct
  source 1..120: note = 1F12A4.249[PD-L2]_H1.50
QVQLVQSGAEVKKPGSSVKVSCKASGVTFSNSVMSWVRQAPGQGLEWMGGIIPIFLAVNYAPKFQGRVTITADESTSTAYMELSSLRSEDTAVYYCAREVSRPGTEFDKWGQGTLVTVSS

SEQ ID NO: 3325 - protein, 120 aa, synthetic construct
  source 1..120: note = 1F12A4.249[PD-L2]_H1.51
QVQLVQSGAEVKKPGSSVKVSCKASGGTFSNSVMSWVRQAPGQGLEWMGGIIPIFLAVNYAPKFQGRVTITADESTSTAYMELSSLRSEDTAVYYCAREVVRPGTEFDYWGQGTLVTVSS

SEQ ID NO: 3326 - protein, 120 aa, synthetic construct
  source 1..120: note = 1F12A4.249[PD-L2]_H1.52
QVQLVQSGAEVKKPGSSVKVSCKASGGSFSVSVMSWVRQAPGQGLEWMGGIIPIFLAVNYAPKFQGRVTITADESTSTAYMELSSLRSEDTAVYYCAREVSRPGTEFDYWGQGTLVTVSS

SEQ ID NO: 3327 - protein, 120 aa, synthetic construct
  source 1..120: note = 1F12A4.249[PD-L2]_H1.53
QVQLVQSGAEVKKPGSSVKVSCKASGETFPNSVMSWVRQAPGQGLEWMGGIIPIFLAVNYAPKFQGRVTITADESTSTAYMELSSLRSEDTAVYYCAREVSRPGTEFDYWGQGTLVTVSS

SEQ ID NO: 3328 - protein, 120 aa, synthetic construct
  source 1..120: note = 1F12A4.249[PD-L2]_H1.54
QVQLVQSGAEVKKPGSSVKVSCKASGGKFSNSVMSWVRQAPGQGLEWMGGIIPIFLAVNYAPKFQGRVTITADESTSTAYMELSSLRSEDTAVYYCAREVYRPGTEFDYWGQGTLVTVSS

SEQ ID NO: 3329 - protein, 120 aa, synthetic construct
  source 1..120: note = 1F12A4.249[PD-L2]_H1.55
QVQLVQSGAEVKKPGSSVKVSCKASGETFLNSVMSWVRQAPGQGLEWMGGIIPIFLAVNYAPKFQGRVTITADESTSTAYMELSSLRSEDTAVYYCAREVSRPGTEFDYWGQGTLVTVSS

SEQ ID NO: 3330 - protein, 120 aa, synthetic construct
  source 1..120: note = 1F12A4.249[PD-L2]_H1.56
QVQLVQSGAEVKKPGSSVKVSCKASGGGFVNSVMSWVRQAPGQGLEWMGGIIPIFLAVNYAPKFQGRVTITADESTSTAYMELSSLRSEDTAVYYCAREVSRPGTEFDYWGQGTLVTVSS

SEQ ID NO: 3331 - protein, 120 aa, synthetic construct
  source 1..120: note = 1F12A4.249[PD-L2]_H1.57
QVQLVQSGAEVKKPGSSVKVSCKASGGTFSNSVMSWVRQAPGQGLEWMGGIIPFFLAVNYAPKFQGRVTITADESTSTAYMELSSLRSEDTAVYYCAREVSRPGTEFDGWGQGTLVTVSS

SEQ ID NO: 3332 - protein, 120 aa, synthetic construct
  source 1..120: note = 1F12A4.249[PD-L2]_H1.58
QVQLVQSGAEVKKPGSSVKVSCKASGQSFSNSVMSWVRQAPGQGLEWMGGIIPIFLAVNYAPKFQGRVTITADESTSTAYMELSSLRSEDTAVYYCAREVSRPGTEFDYWGQGTLVTVSS

SEQ ID NO: 3333 - protein, 120 aa, synthetic construct
  source 1..120: note = 1F12A4.249[PD-L2]_H1.59
QVQLVQSGAEVKKPGSSVKVSCKASGGTFSNSVMSWVRQAPGQGLEWMGGIIPIFLAVNYAPKFQGRVTITADESTSTAYMELSSLRSEDTAVYYCAREVSRPGTEFDGWGQGTLVTVSS

SEQ ID NO: 3334 - protein, 120 aa, synthetic construct
  source 1..120: note = 1F12A4.249[PD-L2]_H1.60
QVQLVQSGAEVKKPGSSVKVSCKASGGEFSLSVMSWVRQAPGQGLEWMGGIIPIFLAVNYAPKFQGRVTITADESTSTAYMELSSLRSEDTAVYYCAREVSRPGTEFDYWGQGTLVTVSS

SEQ ID NO: 3335 - protein, 120 aa, synthetic construct
  source 1..120: note = 1F12A4.249[PD-L2]_H1.61
QVQLVQSGAEVKKPGSSVKVSCKASGGTFSNSIMSWVRQAPGQGLEWMGGIIPLFLAVNYAPKFQGRVTITADESTSTAYMELSSLRSEDTAVYYCAREVSRPGTEFDYWGQGTLVTVSS

SEQ ID NO: 3336 - protein, 120 aa, synthetic construct
  source 1..120: note = 1F12A4.249[PD-L2]_H1.62
QVQLVQSGAEVKKPGSSVKVSCKASGGLFSNSVMSWVRQAPGQGLEWMGGIIPIFLAVNYAPKFQGRVTITADESTSTAYMELSSLRSEDTAVYYCAREVSRPGTEFDGWGQGTLVTVSS

SEQ ID NO: 3337 - protein, 120 aa, synthetic construct
  source 1..120: note = 1F12A4.249[PD-L2]_H1.63
QVQLVQSGAEVKKPGSSVKVSCKASGGTFSNSVMSWVRQAPGQGLEWMGGIIPLFLAVNYAPKFQGRVTITADESTSTAYMELSSLRSEDTAVYYCAREVSRPGTEFDYWGQGTLVTVSS

SEQ ID NO: 3338 - protein, 120 aa, synthetic construct
  source 1..120: note = 1F12A4.249[PD-L2]_H1.64
QVQLVQSGAEVKKPGSSVKVSCKASGGTFSNSVMSWVRQAPGQGLEWMGGIIPWFLAVNYAPKFQGRVTITADESTSTAYMELSSLRSEDTAVYYCAREVLRPGTEFDYWGQGTLVTVSS

SEQ ID NO: 3339 - protein, 120 aa, synthetic construct
  source 1..120: note = 1F12A4.249[PD-L2]_H1.65
QVQLVQSGAEVKKPGSSVKVSCKASGPTFSNSVMSWVRQAPGQGLEWMGGIIPLFLAVNYAPKFQGRVTITADESTSTAYMELSSLRSEDTAVYYCAREVSRPGTEFDYWGQGTLVTVSS

SEQ ID NO: 3340 - protein, 120 aa, synthetic construct
  source 1..120: note = 1F12A4.249[PD-L2]_H1.66
QVQLVQSGAEVKKPGSSVKVSCKASGGTFSNSVMSWVRQAPGQGLEWMGGIIPIFLAVNYAPKFQGRVTITADESTSTAYMELSSLRSEDTAVYYCAREVLRPGTEFDYWGQGTLVTVSS

SEQ ID NO: 3341 - protein, 120 aa, synthetic construct
  source 1..120: note = 1F12A4.249[PD-L2]_H1.67
QVQLVQSGAEVKKPGSSVKVSCKASGGTFLNSVMSWVRQAPGQGLEWMGGIIPIWLAVNYAPKFQGRVTITADESTSTAYMELSSLRSEDTAVYYCAREVSRPGTEFDYWGQGTLVTVSS

SEQ ID NO: 3342 - protein, 120 aa, synthetic construct
  source 1..120: note = 1F12A4.249[PD-L2]_H1.68
QVQLVQSGAEVKKPGSSVKVSCKASGGTFVNSVMSWVRQAPGQGLEWMGGIIPIFLAVNYAPKFQGRVTITADESTSTAYMELSSLRSEDTAVYYCAREVWRPGTEFDYWGQGTLVTVSS

SEQ ID NO: 3343 - protein, 120 aa, synthetic construct
  source 1..120: note = 1F12A4.249[PD-L2]_H1.69
QVQLVQSGAEVKKPGSSVKVSCKASGGKFSNSVMSWVRQAPGQGLEWMGGIIPIFLAVNYAPKFQGRVTITADESTSTAYMELSSLRSEDTAVYYCAREISRPGTEFDYWGQGTLVTVSS

SEQ ID NO: 3344 - protein, 120 aa, synthetic construct
  source 1..120: note = 1F12A4.249[PD-L2]_H1.70
QVQLVQSGAEVKKPGSSVKVSCKASGGTFGNSVMSWVRQAPGQGLEWMGGIIPIFLANNYAPKFQGRVTITADESTSTAYMELSSLRSEDTAVYYCAREVSRPGTEFDYWGQGTLVTVSS

SEQ ID NO: 3345 - protein, 120 aa, synthetic construct
  source 1..120: note = 1F12A4.249[PD-L2]_H1.71
QVQLVQSGAEVKKPGSSVKVSCKASGGTFSNSVMSWVRQAPGQGLEWMGGIIPIFLAVNYAPKFQGRVTITADESTSTAYMELSSLRSEDTAVYYCAREQSRPGTEFDYWGQGTLVTVSS

SEQ ID NO: 3346 - protein, 120 aa, synthetic construct
  source 1..120: note = 1F12A4.249[PD-L2]_H1.72
QVQLVQSGAEVKKPGSSVKVSCKASGWTFSNSVMSWVRQAPGQGLEWMGGIIPIFLAVNYAPKFQGRVTITADESTSTAYMELSSLRSEDTAVYYCAREVVRPGTEFDYWGQGTLVTVSS

SEQ ID NO: 3347 - protein, 120 aa, synthetic construct
  source 1..120: note = 1F12A4.249[PD-L2]_H1.73
QVQLVQSGAEVKKPGSSVKVSCKASGDTFSNSVMSWVRQAPGQGLEWMGGIIPIFLAVNYAPKFQGRVTITADESTSTAYMELSSLRSEDTAVYYCAREVSRPGTEFDYWGQGTLVTVSS

SEQ ID NO: 3348 - protein, 25 aa, synthetic construct [sequence omitted]

SEQ ID NO: 3349 - protein, 14 aa, synthetic construct
  source 1..14: note = 1F12A4.249 VH HFR2
WVRQAPGQGLEWMG

SEQ ID NO: 3350 - protein, 17 aa, synthetic construct
  source 1..17: note = 1F12A4.249 VH HCDR2
  VARIANT 5: note = I, L, F, Q or W
  VARIANT 6: note = F or W
  VARIANT 7: note = L, V, M or G
  VARIANT 9: note = V, S, I or N
  VARIANT 12: note = A or T
  VARIANT 13: note = P or Q
GIIPXXXAXNYXXKFQG

SEQ ID NO: 3351 - protein, 32 aa, synthetic construct; identical to SEQ ID NO: 3264
  source 1..32: note = 1F12A4.249 VH HFR3

SEQ ID NO: 3352 - protein, 11 aa, synthetic construct
  source 1..11: note = 1F12A4.249 VH HCDR3
  VARIANT 2: note = V, N, P, I, L or Q
  VARIANT 3: note = S, V, F, I, T, L, Y or W
  VARIANT 11: note = Y, S, A, N, W, K or G
EXXRPGTEFDX

SEQ ID NO: 3353 - protein, 11 aa, synthetic construct
  source 1..11: note = 1F12A4.249 VH HFR4
WGQGTLVTVSS

SEQ ID NO: 3354 - protein, 121 aa, synthetic construct
  source 1..121: note = 1A7[CD28]_H1.103
EVQLLESGGGLVQPGGSLRLSCAASGFTFSSYYMSWVRQAPGKGLEWVSTISERMDSTYYADSVKGRFTISRDNSKNTLYLQMNSLRAEDTAVYYCAKSGPGLRQVGFDYWGQGTLVTVSS

SEQ ID NO: 3355 - protein, 121 aa, synthetic construct
  source 1..121: note = 1A7[CD28]_H1.104
EVQLLESGGGLVQPGGSLRLSCAASGFTFSSYYMSWVRQAPGKGLEWVSTISERGDPTYYADSVKGRFTISRDNSKNTLYLQMNSLRAEDTAVYYCAKSGPGLRQVGFDYWGQGTLVTVSS

SEQ ID NO: 3356 - protein, 121 aa, synthetic construct
  source 1..121: note = 1A7[CD28]_H1.105
EVQLLESGGGLVQPGGSLRLSCAASGFTFSSYYMSWVRQAPGKGLEWVSTISERLDSTYYADSVKGRFTISRDNSKNTLYLQMNSLRAEDTAVYYCAKSGPGLRQVGFDYWGQGTLVTVSS

SEQ ID NO: 3357 - protein, 121 aa, synthetic construct
  source 1..121: note = 1A7[CD28]_H1.106
EVQLLESGGGLVQPGGSLRLSCAASGFTFSSYYMSWVRQAPGKGLEWVSTISERGDSTYYADSVKGRFTISRDNSKNTLYLQMNSLRAEDTAVYYCAKSGPGLRQVGFDYWGQGTLVTVSS

SEQ ID NO: 3358 - protein, 121 aa, synthetic construct
  source 1..121: note = 1A7[CD28]_H1.107
EVQLLESGGGLVQPGGSLRLSCAASGFTFSSYYMSWVRQAPGKGLEWVSTISESSDVTYYADSVKGRFTISRDNSKNTLYLQMNSLRAEDTAVYYCAKSGPGLRQVGFDYWGQGTLVTVSS

SEQ ID NO: 3359 - protein, 121 aa, synthetic construct
  source 1..121: note = 1A7[CD28]_H1.108
EVQLLESGGGLVQPGGSLRLSCAASGFTFSSYYMSWVRQAPGKGLEWVSTISERNDSTYYADSVKGRFTISRDNSKNTLYLQMNSLRAEDTAVYYCAKSGPGLRQVGFDYWGQGTLVTVSS

SEQ ID NO: 3360 - protein, 121 aa, synthetic construct
  source 1..121: note = 1A7[CD28]_H1.109
EVQLLESGGGLVQPGGSLRLSCAASGFTFSSYYMSWVRQAPGKGLEWVSTISERRDSTYYADSVKGRFTISRDNSKNTLYLQMNSLRAEDTAVYYCAKSGPGLRQVGFDYWGQGTLVTVSS

SEQ ID NO: 3361 - protein, 121 aa, synthetic construct
  source 1..121: note = 1A7[CD28]_H1.110
EVQLLESGGGLVQPGGSLRLSCAASGFTFSSYYMSWVRQAPGKGLEWVWTISERGDSTYYADSVKGRFTISRDNSKNTLYLQMNSLRAEDTAVYYCAKSGPGLRQVGFDYWGQGTLVTVSS

SEQ ID NO: 3362 - protein, 121 aa, synthetic construct
  source 1..121: note = 1A7[CD28]_H1.111
EVQLLESGGGLVQPGGSLRLSCAASGFTFSSYYMSWVRQAPGKGLEWVSTISERSDSTYYADSVKGRFTISRDNSKNTLYLQMNSLRAEDTAVYYCAKSGPGLRQVGFDYWGQGTLVTVSS

SEQ ID NO: 3363 - protein, 121 aa, synthetic construct
  source 1..121: note = 1A7[CD28]_H1.112
EVQLLESGGGLVQPGGSLRLSCAASGFTFSSYYMSWVRQAPGKGLEWVSTISERQDSTYYADSVKGRFTISRDNSKNTLYLQMNSLRAEDTAVYYCAKSGPGLRQVGFDYWGQGTLVTVSS

SEQ ID NO: 3364 - protein, 121 aa, synthetic construct
  source 1..121: note = 1A7[CD28]_H1.113
EVQLLESGGGLVQPGGSLRLSCAASGFTFSSYYMSWVRQAPGKGLEWVSTISERTDSTYYADSVKGRFTISRDNSKNTLYLQMNSLRAEDTAVYYCAKSGPGLRQVGFDYWGQGTLVTVSS

SEQ ID NO: 3365 - protein, 121 aa, synthetic construct
  source 1..121: note = 1A7[CD28]_H1.114
EVQLLESGGGLVQPGGSLRLSCAASGFTFSSYYMSWVRQAPGKGLEWVSTIAERGDSTYYADSVKGRFTISRDNSKNTLYLQMNSLRAEDTAVYYCAKSGPGLRQVGFDYWGQGTLVTVSS

SEQ ID NO: 3366 - protein, 121 aa, synthetic construct
  source 1..121: note = 1A7[CD28]_H1.115
EVQLLESGGGLVQPGGSLRLSCAASGFTFSSYYMSWVRQAPGKGLEWVMTISESGDYTYYADSVKGRFTISRDNSKNTLYLQMNSLRAEDTAVYYCAKSGPGLRQVGFDYWGQGTLVTVSS

SEQ ID NO: 3367 - protein, 121 aa, synthetic construct
  source 1..121: note = 1A7[CD28]_H1.116
EVQLLESGGGLVQPGGSLRLSCAASGFTFSSYYMSWVRQAPGKGLEWVSTISERKDSTYYADSVKGRFTISRDNSKNTLYLQMNSLRAEDTAVYYCAKSGPGLRQVGFDYWGQGTLVTVSS

SEQ ID NO: 3368 - protein, 121 aa, synthetic construct
  source 1..121: note = 1A7[CD28]_H1.117
EVQLLESGGGLVQPGGSLRLSCAASGFTFSSYYMSWVRQAPGKGLEWVSTISERHDSTYYADSVKGRFTISRDNSKNTLYLQMNSLRAEDTAVYYCAKSGPGLRQVGFDYWGQGTLVTVSS

SEQ ID NO: 3369 - protein, 121 aa, synthetic construct
  source 1..121: note = 1A7[CD28]_H1.118
EVQLLESGGGLVQPGGSLRLSCAASGFTFSSYYMSWVRQAPGKGLEWVSTIAESGDPTYYADSVKGRFTISRDNSKNTLYLQMNSLRAEDTAVYYCAKSGPGLRQVGFDYWGQGTLVTVSS

SEQ ID NO: 3370 - protein, 121 aa, synthetic construct
  source 1..121: note = 1A7[CD28]_H1.119
EVQLLESGGGLVQPGGSLRLSCAASGFTFSSYYMSWVRQAPGKGLEWVSTIVERGDVTYYADSVKGRFTISRDNSKNTLYLQMNSLRAEDTAVYYCAKSGPGLRQVGFDYWGQGTLVTVSS

SEQ ID NO: 3371 - protein, 121 aa, synthetic construct
  source 1..121: note = 1A7[CD28]_H1.120
EVQLLESGGGLVQPGGSLRLSCAASGFTFSSYYMSWVRQAPGKGLEWVSTISERYDSTYYADSVKGRFTISRDNSKNTLYLQMNSLRAEDTAVYYCAKSGPGLRQVGFDYWGQGTLVTVSS

SEQ ID NO: 3372 - protein, 121 aa, synthetic construct; identical to SEQ ID NO: 2497
  source 1..121: note = 1A7[CD28]_H1.121

SEQ ID NO: 3373 - protein, 121 aa, synthetic construct
  source 1..121: note = 1A7[CD28]_H1.122
EVQLLESGGGLVQPGGSLRLSCAASGFTFSSYYMSWVRQAPGKGLEWVTTISESGDPTYYADSVKGRFTISRDNSKNTLYLQMNSLRAEDTAVYYCAKSGPGLRQVGFDYWGQGTLVTVSS

SEQ ID NO: 3374 - protein, 121 aa, synthetic construct
  source 1..121: note = 1A7[CD28]_H1.123
EVQLLESGGGLVQPGGSLRLSCAASGFTFSSYYMSWVRQAPGKGLEWVSTISENLDSTYYADSVKGRFTISRDNSKNTLYLQMNSLRAEDTAVYYCAKSGPGLRQVGFDYWGQGTLVTVSS

SEQ ID NO: 3375 - protein, 121 aa, synthetic construct
  source 1..121: note = 1A7[CD28]_H1.124
EVQLLESGGGLVQPGGSLRLSCAASGFTFSSYYMSWVRQAPGKGLEWVSTISESADVTYYADSVKGRFTISRDNSKNTLYLQMNSLRAEDTAVYYCAKSGPGLRQVGFDYWGQGTLVTVSS

SEQ ID NO: 3376 - protein, 121 aa, synthetic construct
  source 1..121: note = 1A7[CD28]_H1.125
EVQLLESGGGLVQPGGSLRLSCAASGFTFSSYYMSWVRQAPGKGLEWVSTISEHGLSTYYADSVKGRFTISRDNSKNTLYLQMNSLRAEDTAVYYCAKSGPGLRQVGFDYWGQGTLVTVSS

SEQ ID NO: 3377 - protein, 121 aa, synthetic construct
  source 1..121: note = 1A7[CD28]_H1.126
EVQLLESGGGLVQPGGSLRLSCAASGFTFSSYYMSWVRQAPGKGLEWVSTISERDDSTYYADSVKGRFTISRDNSKNTLYLQMNSLRAEDTAVYYCAKSGPGLRQVGFDYWGQGTLVTVSS

SEQ ID NO: 3378 - protein, 121 aa, synthetic construct
  source 1..121: note = 1A7[CD28]_H1.127
EVQLLESGGGLVQPGGSLRLSCAASGFTFSSYYMSWVRQAPGKGLEWVSTISENRDSTYYADSVKGRFTISRDNSKNTLYLQMNSLRAEDTAVYYCAKSGPGLRQVGFDYWGQGTLVTVSS

SEQ ID NO: 3379 - protein, 121 aa, synthetic construct
  source 1..121: note = 1A7[CD28]_H1.128
EVQLLESGGGLVQPGGSLRLSCAASGFTFSSYYMSWVRQAPGKGLEWVSTISERFDSTYYADSVKGRFTISRDNSKNTLYLQMNSLRAEDTAVYYCAKSGPGLRQVGFDYWGQGTLVTVSS

SEQ ID NO: 3380 - protein, 121 aa, synthetic construct
  source 1..121: note = 1A7[CD28]_H1.129
EVQLLESGGGLVQPGGSLRLSCAASGFTFSSYYMSWVRQAPGKGLEWVSTISERADSTYYADSVKGRFTISRDNSKNTLYLQMNSLRAEDTAVYYCAKSGPGLRQVGFDYWGQGTLVTVSS

SEQ ID NO: 3381 - protein, 121 aa, synthetic construct
  source 1..121: note = 1A7[CD28]_H1.130
EVQLLESGGGLVQPGGSLRLSCAASGFTFSSYYMSWVRQAPGKGLEWVSTISERGDVTYYADSVKGRFTISRDNSKNTLYLQMNSLRAEDTAVYYCAKSGPGLRQVGFDYWGQGTLVTVSS

SEQ ID NO: 3382 - protein, 121 aa, synthetic construct
  source 1..121: note = 1A7[CD28]_H1.131
EVQLLESGGGLVQPGGSLRLSCAASGFTFSSYYMSWVRQAPGKGLEWVSTISEREDSTYYADSVKGRFTISRDNSKNTLYLQMNSLRAEDTAVYYCAKSGPGLRQVGFDYWGQGTLVTVSS

SEQ ID NO: 3383 - protein, 121 aa, synthetic construct
  source 1..121: note = 1A7[CD28]_H1.132
EVQLLESGGGLVQPGGSLRLSCAASGFTFSSYYMSWVRQAPGKGLEWVSTISESSMSTYYADSVKGRFTISRDNSKNTLYLQMNSLRAEDTAVYYCAKSGPGLRQVGFDYWGQGTLVTVSS

SEQ ID NO: 3384 - protein, 121 aa, synthetic construct
  source 1..121: note = 1A7[CD28]_H1.133
EVQLLESGGGLVQPGGSLRLSCAASGFTFSSYYMSWVRQAPGKGLEWVSTISESVDPTYYADSVKGRFTISRDNSKNTLYLQMNSLRAEDTAVYYCAKSGPGLRQVGFDYWGQGTLVTVSS

SEQ ID NO: 3385 - protein, 121 aa, synthetic construct
  source 1..121: note = 1A7[CD28]_H1.134
EVQLLESGGGLVQPGGSLRLSCAASGFTFSSYYMSWVRQAPGKGLEWVMTISERGDSTYYADSVKGRFTISRDNSKNTLYLQMNSLRAEDTAVYYCAKSGPGLRQVGFDYWGQGTLVTVSS

SEQ ID NO: 3386 - protein, 121 aa, synthetic construct
  source 1..121: note = 1A7[CD28]_H1.135
EVQLLESGGGLVQPGGSLRLSCAASGFTFSSYYMSWVRQAPGKGLEWVSTISESWDHTYYADSVKGRFTISRDNSKNTLYLQMNSLRAEDTAVYYCAKSGPGLRQVGFDYWGQGTLVTVSS

SEQ ID NO: 3387 - protein, 121 aa, synthetic construct
  source 1..121: note = 1A7[CD28]_H1.136
EVQLLESGGGLVQPGGSLRLSCAASGFTFSSYYMSWVRQAPGKGLEWVSTISERIDSTYYADSVKGRFTISRDNSKNTLYLQMNSLRAEDTAVYYCAKSGPGLRQVGFDYWGQGTLVTVSS

SEQ ID NO: 3388 - protein, 121 aa, synthetic construct
  source 1..121: note = 1A7[CD28]_H1.137
EVQLLESGGGLVQPGGSLRLSCAASGFTFSSYYMSWVRQAPGKGLEWVVTISERGDSTYYADSVKGRFTISRDNSKNTLYLQMNSLRAEDTAVYYCAKSGPGLRQVGFDYWGQGTLVTVSS

SEQ ID NO: 3389 - protein, 121 aa, synthetic construct
  source 1..121: note = 1A7[CD28]_H1.138
EVQLLESGGGLVQPGGSLRLSCAASGFTFSSYYMSWVRQAPGKGLEWVTTISERGDSTYYADSVKGRFTISRDNSKNTLYLQMNSLRAEDTAVYYCAKSGPGLRQVGFDYWGQGTLVTVSS

SEQ ID NO: 3390 - protein, 30 aa, synthetic construct
  source 1..30: note = 1A7 VH HFR1
EVQLLESGGGLVQPGGSLRLSCAASGFTFS

SEQ ID NO: 3391 - protein, 5 aa, synthetic construct
  source 1..5: note = 1A7 VH HCDR1
SYYMS

SEQ ID NO: 3392 - protein, 14 aa, synthetic construct
  source 1..14: note = 1A7 VH HFR2
  VARIANT 14: note = S, W, M, T or V
WVRQAPGKGLEWVX

SEQ ID NO: 3393 - protein, 17 aa, synthetic construct
  source 1..17: note = 1A7 VH HCDR2
  VARIANT 3: note = A, V or S
  VARIANT 5: note = S, N, H or R
  VARIANT 6: note = G, L, S, N, R, Q, T, K, H, Y, A, D, F, E, V, W, I or M
  VARIANT 7: note = L, M or D
  VARIANT 8: note = S, P, V, Y or H
TIXEXXXXTYYADSVKG

SEQ ID NO: 3394 - protein, 121 aa, synthetic construct
  source 1..121: note = 1A7[CD28]_H1.1_L1 [S-S] Variable Heavy (vh) Domain
EVQLLESGGGLVQPGGSLRLSCAASGFTFSSYYMSWVRQAPGKCLEWVSTISGSGDSTYYADSVKGRFTISRDNSKNTLYLQMNSLRAEDTAVYYCAKSGPGLRQVGFDYWGQGTLVTVSS

SEQ ID NO: 3395 - protein, 5 aa, synthetic construct
  source 1..5: note = 1A7[CD28]_H1.1_L1 [S-S] vhCDR1
SYYMS

SEQ ID NO: 3396 - protein, 17 aa, synthetic construct
  source 1..17: note = 1A7[CD28]_H1.1_L1 [S-S] vhCDR2
TISGSGDSTYYADSVKG

SEQ ID NO: 3397 - protein, 12 aa, synthetic construct
  source 1..12: note = 1A7[CD28]_H1.1_L1 [S-S] vhCDR3
SGPGLRQVGFDY

SEQ ID NO: 3398 - protein, 107 aa, synthetic construct
  source 1..107: note = 1A7[CD28]_H1.1_L1 [S-S] Variable Light (vl) Domain
DIQMTQSPSSLSASVGDRVTITCRASQSISSYLNWYQQKPGKAPKLLIYAASSLQSGVPSRFSGSGSGTDFTLTISSLQPEDFATYYCQQSYSTPFTFGCGTKLEIK

SEQ ID NO: 3399 - protein, 11 aa, synthetic construct
  source 1..11: note = 1A7[CD28]_H1.1_L1 [S-S] vlCDR1
RASQSISSYLN

SEQ ID NO: 3400 - protein, 7 aa, synthetic construct
  source 1..7: note = 1A7[CD28]_H1.1_L1 [S-S] vlCDR2
AASSLQS

SEQ ID NO: 3401 - protein, 9 aa, synthetic construct
  source 1..9: note = 1A7[CD28]_H1.1_L1 [S-S] vlCDR3
QQSYSTPFT

SEQ ID NO: 3402 - protein, 121 aa, synthetic construct
  source 1..121: note = 1A7[CD28]_H1_L1.71 [S-S] Variable Heavy (vh) Domain
EVQLLESGGGLVQPGGSLRLSCAASGFTFSSYAMSWVRQAPGKCLEWVSTISGSGDSTYYADSVKGRFTISRDNSKNTLYLQMNSLRAEDTAVYYCAKSGPGLRQVGFDYWGQGTLVTVSS

SEQ ID NO: 3403 - protein, 5 aa, synthetic construct
  source 1..5: note = 1A7[CD28]_H1_L1.71 [S-S] vhCDR1
SYAMS

SEQ ID NO: 3404 - protein, 17 aa, synthetic construct
  source 1..17: note = 1A7[CD28]_H1_L1.71 [S-S] vhCDR2
TISGSGDSTYYADSVKG

SEQ ID NO: 3405 - protein, 12 aa, synthetic construct
  source 1..12: note = 1A7[CD28]_H1_L1.71 [S-S] vhCDR3
SGPGLRQVGFDY

SEQ ID NO: 3406 - protein, 107 aa, synthetic construct
  source 1..107: note = 1A7[CD28]_H1_L1.71 [S-S] Variable Light (vl) Domain
DIQMTQSPSSLSASVGDRVTITCRASQSISSYLNWYQQKPGKAPKLLIYAASSLQSGVPSRFSGSGSGTDFTLTISSLQPEDFATYYCQQVYSTPFTFGCGTKLEIK

SEQ ID NO: 3407 - protein, 11 aa, synthetic construct
  source 1..11: note = 1A7[CD28]_H1_L1.71 [S-S] vlCDR1
RASQSISSYLN

SEQ ID NO: 3408 - protein, 7 aa, synthetic construct
  source 1..7: note = 1A7[CD28]_H1_L1.71 [S-S] vlCDR2
AASSLQS

SEQ ID NO: 3409 - protein, 9 aa, synthetic construct
  source 1..9: note = 1A7[CD28]_H1_L1.71 [S-S] vlCDR3
QQVYSTPFT

SEQ ID NO: 3410 - protein, 121 aa, synthetic construct; identical to SEQ ID NO: 3394
  source 1..121: note = 1A7[CD28]_H1.1_L1.71 [S-S] Variable Heavy (vh) Domain

SEQ ID NO: 3411 - protein, 5 aa, synthetic construct
  source 1..5: note = 1A7[CD28]_H1.1_L1.71 [S-S] vhCDR1
SYYMS

SEQ ID NO: 3412 - protein, 17 aa, synthetic construct
  source 1..17: note = 1A7[CD28]_H1.1_L1.71 [S-S] vhCDR2
TISGSGDSTYYADSVKG

SEQ ID NO: 3413 - protein, 12 aa, synthetic construct
  source 1..12: note = 1A7[CD28]_H1.1_L1.71 [S-S] vhCDR3
SGPGLRQVGFDY

SEQ ID NO: 3414 - protein, 107 aa, synthetic construct; identical to SEQ ID NO: 3406
  source 1..107: note = 1A7[CD28]_H1.1_L1.71 [S-S] Variable Light (vl) Domain

SEQ ID NO: 3415 - protein, 11 aa, synthetic construct
  source 1..11: note = 1A7[CD28]_H1.1_L1.71 [S-S] vlCDR1
RASQSISSYLN

SEQ ID NO: 3416 - protein, 7 aa, synthetic construct
  source 1..7: note = 1A7[CD28]_H1.1_L1.71 [S-S] vlCDR2
AASSLQS

SEQ ID NO: 3417 - protein, 9 aa, synthetic construct
  source 1..9: note = 1A7[CD28]_H1.1_L1.71 [S-S] vlCDR3
QQVYSTPFT

SEQ ID NO: 3418 - protein, 121 aa, synthetic construct
  source 1..121: note = 1A7[CD28]_H1.14_L1 [S-S] Variable Heavy (vh) Domain
EVQLLESGGGLVQPGGSLRLSCAASGFTFSSYYMSWVRQAPGKCLEWVSTISESGDSTYYADSVKGRFTISRDNSKNTLYLQMNSLRAEDTAVYYCAKSGPGLRQVGFDYWGQGTLVTVSS

SEQ ID NO: 3419 - protein, 5 aa, synthetic construct
  source 1..5: note = 1A7[CD28]_H1.14_L1 [S-S] vhCDR1
SYYMS

SEQ ID NO: 3420 - protein, 17 aa, synthetic construct
  source 1..17: note = 1A7[CD28]_H1.14_L1 [S-S] vhCDR2
TISESGDSTYYADSVKG

SEQ ID NO: 3421 - protein, 12 aa, synthetic construct
  source 1..12: note = 1A7[CD28]_H1.14_L1 [S-S] vhCDR3
SGPGLRQVGFDY

SEQ ID NO: 3422 - protein, 107 aa, synthetic construct; identical to SEQ ID NO: 3398
  source 1..107: note = 1A7[CD28]_H1.14_L1 [S-S] Variable Light (vl) Domain

SEQ ID NO: 3423 - protein, 11 aa, synthetic construct
  source 1..11: note = 1A7[CD28]_H1.14_L1 [S-S] vlCDR1
RASQSISSYLN

SEQ ID NO: 3424 - protein, 7 aa, synthetic construct
  source 1..7: note = 1A7[CD28]_H1.14_L1 [S-S] vlCDR2
AASSLQS

SEQ ID NO: 3425 - protein, 9 aa, synthetic construct
  source 1..9: note = 1A7[CD28]_H1.14_L1 [S-S] vlCDR3
QQSYSTPFT

SEQ ID NO: 3426 - protein, 121 aa, synthetic construct; identical to SEQ ID NO: 3418
  source 1..121: note = 1A7[CD28]_H1.14_L1.71 [S-S] Variable Heavy (vh) Domain

SEQ ID NO: 3427 - protein, 5 aa, synthetic construct
  source 1..5: note = 1A7[CD28]_H1.14_L1.71 [S-S] vhCDR1
SYYMS

SEQ ID NO: 3428 - protein, 17 aa, synthetic construct
  source 1..17: note = 1A7[CD28]_H1.14_L1.71 [S-S] vhCDR2
TISESGDSTYYADSVKG

SEQ ID NO: 3429 - protein, 12 aa, synthetic construct
  source 1..12: note = 1A7[CD28]_H1.14_L1.71 [S-S] vhCDR3
SGPGLRQVGFDY

SEQ ID NO: 3430 - protein, 107 aa, synthetic construct; identical to SEQ ID NO: 3406
  source 1..107: note = 1A7[CD28]_H1.14_L1.71 [S-S] Variable Light (vl) Domain

SEQ ID NO: 3431 - protein, 11 aa, synthetic construct
  source 1..11: note = 1A7[CD28]_H1.14_L1.71 [S-S] vlCDR1
RASQSISSYLN

SEQ ID NO: 3432 - protein, 7 aa, synthetic construct
  source 1..7: note = 1A7[CD28]_H1.14_L1.71 [S-S] vlCDR2
AASSLQS

SEQ ID NO: 3433 - protein, 9 aa, synthetic construct
  source 1..9: note = 1A7[CD28]_H1.14_L1.71 [S-S] vlCDR3
QQVYSTPFT

SEQ ID NO: 3434 - protein, 121 aa, synthetic construct
  source 1..121: note = 1A7[CD28]_H1.129_L1.71 [S-S] Variable Heavy (vh) Domain
EVQLLESGGGLVQPGGSLRLSCAASGFTFSSYYMSWVRQAPGKCLEWVSTISERADSTYYADSVKGRFTISRDNSKNTLYLQMNSLRAEDTAVYYCAKSGPGLRQVGFDYWGQGTLVTVSS

SEQ ID NO: 3435 - protein, 5 aa, synthetic construct
  source 1..5: note = 1A7[CD28]_H1.129_L1.71 [S-S] vhCDR1
SYYMS

SEQ ID NO: 3436 - protein, 17 aa, synthetic construct
  source 1..17: note = 1A7[CD28]_H1.129_L1.71 [S-S] vhCDR2
TISERADSTYYADSVKG

SEQ ID NO: 3437 - protein, 12 aa, synthetic construct
  source 1..12: note = 1A7[CD28]_H1.129_L1.71 [S-S] vhCDR3
SGPGLRQVGFDY

SEQ ID NO: 3438 - protein, 107 aa, synthetic construct; identical to SEQ ID NO: 3406
  source 1..107: note = 1A7[CD28]_H1.129_L1.71 [S-S] Variable Light (vl) Domain

SEQ ID NO: 3439 - protein, 11 aa, synthetic construct
  source 1..11: note = 1A7[CD28]_H1.129_L1.71 [S-S] vlCDR1
RASQSISSYLN

SEQ ID NO: 3440 - protein, 7 aa, synthetic construct
  source 1..7: note = 1A7[CD28]_H1.129_L1.71 [S-S] vlCDR2
AASSLQS

SEQ ID NO: 3441 - protein, 9 aa, synthetic construct
  source 1..9: note = 1A7[CD28]_H1.129_L1.71 [S-S] vlCDR3
QQVYSTPFT

SEQ ID NO: 3442 - protein, 121 aa, synthetic construct
  source 1..121: note = 1A7[CD28]_H1.106_L1.71 [S-S] Variable Heavy (vh) Domain
EVQLLESGGGLVQPGGSLRLSCAASGFTFSSYYMSWVRQAPGKCLEWVSTISERGDSTYYADSVKGRFTISRDNSKNTLYLQMNSLRAEDTAVYYCAKSGPGLRQVGFDYWGQGTLVTVSS

SEQ ID NO: 3443 - protein, 5 aa, synthetic construct
  source 1..5: note = 1A7[CD28]_H1.106_L1.71 [S-S] vhCDR1
SYYMS

SEQ ID NO: 3444 - protein, 17 aa, synthetic construct
  source 1..17: note = 1A7[CD28]_H1.106_L1.71 [S-S] vhCDR2
TISERGDSTYYADSVKG

SEQ ID NO: 3445 - protein, 12 aa, synthetic construct
  source 1..12: note = 1A7[CD28]_H1.106_L1.71 [S-S] vhCDR3
SGPGLRQVGFDY

SEQ ID NO: 3446 - protein, 107 aa, synthetic construct; identical to SEQ ID NO: 3406
  source 1..107: note = 1A7[CD28]_H1.106_L1.71 [S-S] Variable Light (vl) Domain

SEQ ID NO: 3447 - protein, 11 aa, synthetic construct
  source 1..11: note = 1A7[CD28]_H1.106_L1.71 [S-S] vlCDR1
RASQSISSYLN

SEQ ID NO: 3448 - protein, 7 aa, synthetic construct
  source 1..7: note = 1A7[CD28]_H1.106_L1.71 [S-S] vlCDR2
AASSLQS

SEQ ID NO: 3449 - protein, 9 aa, synthetic construct
  source 1..9: note = 1A7[CD28]_H1.106_L1.71 [S-S] vlCDR3
QQVYSTPFT

SEQ ID NO: 3450 - protein, 121 aa, synthetic construct; identical to SEQ ID NO: 3434
  source 1..121: note = 1A7[CD28]_H1.129_L1 [S-S] Variable Heavy (vh) Domain

SEQ ID NO: 3451 - protein, 5 aa, synthetic construct
  source 1..5: note = 1A7[CD28]_H1.129_L1 [S-S] vhCDR1
SYYMS

SEQ ID NO: 3452 - protein, 17 aa, synthetic construct
  source 1..17: note = 1A7[CD28]_H1.129_L1 [S-S] vhCDR2
TISERADSTYYADSVKG

SEQ ID NO: 3453 - protein, 12 aa, synthetic construct
  source 1..12: note = 1A7[CD28]_H1.129_L1 [S-S] vhCDR3
SGPGLRQVGFDY

SEQ ID NO: 3454 - protein, 107 aa, synthetic construct; identical to SEQ ID NO: 3398
  source 1..107: note = 1A7[CD28]_H1.129_L1 [S-S] Variable Light (vl) Domain

SEQ ID NO: 3455 - protein, 11 aa, synthetic construct
  source 1..11: note = 1A7[CD28]_H1.129_L1 [S-S] vlCDR1
RASQSISSYLN

SEQ ID NO: 3456 - protein, 7 aa, synthetic construct
  source 1..7: note = 1A7[CD28]_H1.129_L1 [S-S] vlCDR2
AASSLQS

SEQ ID NO: 3457 - protein, 9 aa, synthetic construct
  source 1..9: note = 1A7[CD28]_H1.129_L1 [S-S] vlCDR3
QQSYSTPFT

SEQ ID NO: 3458 - protein, 121 aa, synthetic construct; identical to SEQ ID NO: 3442
  source 1..121: note = 1A7[CD28]_H1.106_L1 [S-S] Variable Heavy (vh) Domain

SEQ ID NO: 3459 - protein, 5 aa, synthetic construct
  source 1..5: note = 1A7[CD28]_H1.106_L1 [S-S] vhCDR1
SYYMS

SEQ ID NO: 3460 - protein, 17 aa, synthetic construct
  source 1..17: note = 1A7[CD28]_H1.106_L1 [S-S] vhCDR2
TISERGDSTYYADSVKG

SEQ ID NO: 3461 - protein, 12 aa, synthetic construct
  source 1..12: note = 1A7[CD28]_H1.106_L1 [S-S] vhCDR3
SGPGLRQVGFDY

SEQ ID NO: 3462 - protein, 107 aa, synthetic construct; identical to SEQ ID NO: 3398
  source 1..107: note = 1A7[CD28]_H1.106_L1 [S-S] Variable Light (vl) Domain

SEQ ID NO: 3463 - protein, 11 aa, synthetic construct
  source 1..11: note = 1A7[CD28]_H1.106_L1 [S-S] vlCDR1
RASQSISSYLN

SEQ ID NO: 3464 - protein, 7 aa, synthetic construct
  source 1..7: note = 1A7[CD28]_H1.106_L1 [S-S] vlCDR2
AASSLQS

SEQ ID NO: 3465 - protein, 9 aa, synthetic construct
  source 1..9: note = 1A7[CD28]_H1.106_L1 [S-S] vlCDR3
QQSYSTPFT

SEQ ID NO: 3466 - protein, 479 aa, synthetic construct
  source 1..479: note = XENP37412 Chain 2 - 1A7[CD28]_L1_H1.14_scFv(GKPGS)4_Fc(216)_IgG1_C220S/PVA_/S26 7K/S364K/E357Q
DIQMTQSPSSLSASVGDRVTITCRASQSISSYLNWYQQKPGKAPKLLIYAASSLQSGVPSRFSGSGSGTDFTLTISSLQPEDFATYYCQQSYSTPFTFGQGTKLEIKGKPGSGKPGSGKPGSGKPGSEVQLLESGGGLVQPGGSLRLSCAASGFTFSSYYMSWVRQAPGKGLEWVSTISESGDSTYYADSVKGRFTISRDNSKNTLYLQMNSLRAEDTAVYYCAKSGPGLRQVGFDYWGQGTLVTVSSEPKSSDKTHTCPPCPAPPVAGPSVFLFPPKPKDTLMISRTPEVTCVVVDVKHEDPEVKFNWYVDGVEVHNAKTKPREEQYNSTYRVVSVLTVLHQDWLNGKEYKCKVSNKALPAPIEKTISKAKGQPREPQVYTLPPSREQMTKNQVKLTCLVKGFYPSDIAVEWESNGQPENNYKTTPPVLDSDGSFFLYSKLTVDKSRWQQGNVFSCSVMHEALHNHYTQKSLSLSPGK

SEQ ID NO: 3467 - protein, 216 aa, synthetic construct; identical to SEQ ID NO: 1171
  source 1..216: note = XENP39733 Chain 3 - 2G4[PD-L1]_L1.24 Light Chain

SEQ ID NO: 3468 - protein, 5 aa, synthetic construct
  source 1..5: note = TGN1412_H1L1 vhCDR1
SYYIH

SEQ ID NO: 3469 - protein, 17 aa, synthetic construct
  source 1..17: note = TGN1412_H1L1 vhCDR2
CIYPGNVNTNYNEKFKD

SEQ ID NO: 3470 - protein, 11 aa, synthetic construct
  source 1..11: note = TGN1412_H1L1 vhCDR3
SHYGLDWNFDV

SEQ ID NO: 3471 - protein, 11 aa, synthetic construct
  source 1..11: note = TGN1412_H1L1 vlCDR1
HASQNIYVWLN

SEQ ID NO: 3472 - protein, 7 aa, synthetic construct
  source 1..7: note = TGN1412_H1L1 vlCDR2
KASNLHT

SEQ ID NO: 3473 - protein, 9 aa, synthetic construct
  source 1..9: note = TGN1412_H1L1 vlCDR3
QQGQTYPYT

SEQ ID NO: 3474 - protein, 4 aa, synthetic construct
YMNM
